United States Patent Application Publication US 2020/0329713 A1 - sequence listing, part 2

SEQ ID NO: 1 - DNA, 6389548 bp, Bacillus thuringiensis (residues 2,129,851-4,259,700 of 6,389,548)
agaagttatttgaggagcaaaatgtatgagccgcctgttaatgaatgagaacgaaaaatggaataagttcattgaaacaccgctgtatacgaaagtaggcaaagttcatagtgtacaagaacagtttttcgtagcaaaagggccgaaagcgaagattggtgatgtttgcttcgttggagaacataacgtcttatgtgaagtgattgccattgaaaaggaaaataatatgctacttccatttgaacagacagaaaaagtatgttatggagattcagtgacattagtttcagaagatgttgttgtaccacgtggtaatcacttgctcggaaaagtgttaagtgcaaatggtgaagtgttaaatgaggaagctgaaaacattccattacagaaaataaaactagatgcaccacctatacatgcatttgaacgtgaagagattaccgatgtatttgaaacaggaataaaatcaattgattctatgctaacaattggtatcggtcaaaagattggtatttttgctgggtcaggtgttggtaaatcaactttacttggaatgatagcaaaaaatgcaaaagctgatataaacgttattagtttagtaggggaacgtggccgggaagtaaaagactttattcgaaaagagttaggcgaggaaggtatgcgaaaaagcgtcgttgttgtagcgacgtcagatgaaagtcatcttatgcaacttcgtgcagcgaaactcgcaacgtctattgctgaatacttccgtgatcaaggtaataacgtattacttatgatggactctgttactcgttttgccgatgcacgaagaagtgttgatattgctgttaaagagttaccgattggtggtaaaacactgttaatggaaagttatatgaagaagttgttagagcggtccggaaaaacacaaaagggatctataacaggtatttatacggtgcttgttgatggggatgatttaaatggtcctgtaccagatttagcacgtggtattttagatggacatatcgtattaaagcgtgagcttgcaacgcttagtcattaccctgcaatttcagtattagattcagtaagtaggattatggaagaaattgtttcgccacatcattggcagcttgcaaatgaaatgagaaagattttatcaatttataaagaaaatgaattgtattttaagctaggaacgattcaagaaaatgaagaaaatgcttatatttttgaatgtaaaaataaagtagaaggcataaatacatttttaaagcaaggtcgatcggatagtttccaatttgatgatatcgttgaagcgatacagcatatagtataaggcctctgcataagaggtcttatttttttgttttttaatatttcacagatttttttggaaaaaaactatataatagaaaaagagaacgttataatagaaaggggttatgaaaacaggtggataaacagcagtacgacacaataaaattgcaaataaatcaagaaaaagaacatattttaaaagaagtgtatgaattaacagctgaaaaaagaaaaatagaacaaaaaaaagaatatgatttatatgttgtgaaatcgcgtagtaaagtcgtacaaactgggcaacgtattatggctggtatgctttcttcacatacgttttcacctgaaagaatagaagaatggaatcggaaaattaaaaaaacggaaggttttattcaaaaaaatgaaagtcttttagagcaagtaaaagaaaaagaacgtgtcattgatgagatgtatcaagaagattgcaaaaagcttgcgaaagcacaagaaaagctggaagaaaaaatgcttctggatttgaaaatgtgtatgaatggatgaggtgaatgtagtgatacagtctgtattaccggtgcaacaaagtttacctccgcaaaaagaaaaagggctagaagtacaatcgaaaaatgaagattcttcatttgatcgtacgatgagaatggaaaataaaaagcagccgaaaacggagaaaacgaaacgagaagaagcaccaaaagaagagaaaaaagaatataacctttctaaaccatcggtaacgaaagaagaaccaattgtaaagaaagaagaaaaaaaagagacagaacagttgttattagctgtatctgagcaaatggttgcaattgagcaattacatgtgcagccggaattgttatatcaatacatacaaaaaatacaagagctatataaagaatatggcaatattaaacttaatgaattacctgcagctgaattacaacaattacaagaacttctttcaaatatgaatatcaaaaatgctatatgtttagaagatacaatgcaaatggtattagacaaaatgaagatgccagagcaaacgatgcaagcattgaaggttgtagaaacagaaacttgtaatattgcaaagaaacaagaagaatttaaagacgtagatcttccgaaagctgagaacgatggtgcaaaggtagagttgccagaaggtgatgcattaaacgattcgagctctgcaggtgcagagttattaaataaaacgacgagtaccgaacaaatagggaaatcaaatagtggtgctgagaaagtttcattgcctgacttaggaaagaaaatggaagcgcaagtagaagccttgcaaaaatttgtagtgaaacaagaacgtgttttatttcagttaaatccagaaaaatttggtacgttaactgtgtttatgaaaaagcatggagaccaaattgatgttcacgtagaaatggaaaaacacgatgcgaaaaaacgtgttgaagtcatttttgatgaattgaggctaaagttaaaagaaaaagaaattaacattcaaattagctattctgataaagatgaaaaccgtaaagaacagcgagaacaagaacaaaggcaaaagcagaaattagcaagtacgcaacatgagaaacaacaatcaaaagaatttgcgggattattggaggaataaagtgtgccaacagttggattaaatacaacgagtacaaatcatattccgttacaagtaggggcgcaagcaaaaaatgcatctgttaatggtgtgcaatcgccagttcaacaaacaaacggagtatcagcaagtaatcaaaaaacacccggtattatggataaagatgatttcctgaaactttttttagcaagctttcaacatcaagacccgtttaatgcgatggatatgaaccaaatgatgaatcaaacggctcaactatcgcttatggagcaagtacaaaatatgacaaaagcagtagataaactacaatcaacgatgtatacgacagctcttgatggagggatgaaatttttaggaaagtatgttagaggtataaacaataagggagagcaagtgactggtcaagtggaaactgttcgacttgccgaaaataacgatgtacaacttattgttgataatcaagttgtctcacttcgttttgtagaaagggtttcagataaaccgatagcagaaacaaatccagaagatgagaagaaagatgatatagaaaaaaatgaagaggttaagcaaaattaataaaaattaataaaaattaataaaaggagtgtatataggttatgattaaagcgttatatacaagtattacagggatgaatgcggcacaaaatgcattaagtgttacttcaaataatattgcaaatgcacaaacagttggatataaaaagcaaaaagctatttttgatgatctgctatataataatacggttggttcacgtggggatggtgcttatgctggcacgaatccaaagagtattggtaacggtgtaaagtttagtgggacatcaacagattttagtgatggttctcttactttaactagtgataagatggagacagccatagagggaaatggtttatttttagttggcgatcgtaatagtggaaatgtagagtatacgagaaaagggtctttcggtgtatcgaaagataactatgttacaaatacaagtggacagtatgtgctaggttatggtgtgaaaacaggaacacaagaaatagatttttcttcacgaccaagtccaattcatattccaatgggatcagctgttggtgggattcaaacagataaagcaacaataggtggaaaccttcctagaaatcaaaatgcattatctcacgaattcacagtttttgatgaggaaggaaactcgttaacgttacgtgtaaatattaaacaaaagactacaaaagagactgtagatggaaaagaagttgaaaagcctgtgccaggtgaatatacatatacagtttctgtaagaaatgattctaaaaacgaaaaagagtttaagcctgttgaaggcatgacgggcgaaaaaaatcttaaatttgatacattaggaaatctaaaagaaacagatgaatctgtacaaaaaaatccagtaactggtgaaattactaaaggtggaacagttaaaattccttttggtaagggactgacactggacttaagtggtttaacaaattatccgacagggaaaactatttctacaacagaagtaacggggcgtccagctgcaattgcaaatgactattcaatttctgacggtggtttcgttatgatgacatattcggatggtagtatgaaggttgtaggacaactagctgtagctacattccctaattcaggtggattaatgaaaactgggaatggcaattacattgccacaccatcagcagggattccagggataggtgttgccggtgagaatggtgcaggtaatgtaagggggtcagcaaaagaaagttcaaacgtagatttatctgcagaattcgttgacttaatgctatatcaacgtggattccaaggaaatgcgaaagtaattaaagtttcagatgaagtattaaatgaagttgtaaatttaattcgataatatattataaagaaagattgtaatgtagtagaaagggtttttattcgtatgacaagacaagaacgaattttacaattgccatttttcgagaataaacgtgaacttgctgaacaagtactaaaaatggaacgagaagagcatatatatttaccagatcaatttgaaattaagcaagtgcccccgtattcatttgctgaaaagaaagcgattattggtcgtattcatgagttttatttcgtcagtgttggcagtgatggcgcatggaagtatcaactgtttaaggacgagatgaagtgccgtgagttttttattacattatcaggcattacggatcagcaaattgcgttttggttcaacaatatcgagttgcttaaaggcgcttaaaagtgtttttaggcttaggtggctcggagctgtaagaagagaactataaaaatgtactggagtggttgaacaataatctctttatagcaagtcagtactttttatagtctgtgagttgtgacaatagggcaatgaaatgagagtatgctagtttcatttcatatgtttgtgatgatagatttttataaaaggagaggtgaggaggatggcgcaaaataagtatcgcgttacattcatttcgccgagtgaggttgagcagcggactgtaatggcggcgaatagtttgccagatttaattcgtaaagtagagagtattattgcagatccaaacggttattttgtaaatgataaaaaaaataattgttattttaaagtgattaaagaaaatgttacgtttattcaatatgagttactattttcggataaggaaattcatattgaaaaattaaaacatatagcaccggtggtattcaaacgattattcgaaaaaataaatgaaccagaactatatgcactcgcactacttgatgttgatatagcaacgaaagaatatgtgctagcagaaatgaattctgagctgagaataagagtagagacggagctttcgaaaaaatgggaagcaatgccgacagaaattgtaggggcgcaagaagtgttattagaagcacttgcttcgtttatacaagattaattgttttttaataaaatgaattgatcgactatctatattttttatataggtagttgactttttctcttttataaagcttaataattagatatacggaattaatggaaggggagcgacacctttatgtcacaagcacaaagtattttattagaaagcggaacaaatgaattagagattgttacgtacactgttggtgaaaacctatttagtattaatgtaatgaaagtacgtgaaatcattaatccattccctgttacaactgtgccagaatctcatcatgcagttgaaggtgttgttcaagtacgtggtgaaattttacctgttattaacttggcaatggctcttaatttaaagtcaacaaagccacttgatcaaacgaaatttatcatctcagaattaaaccaaatgaaagttattttccgcgttgatgaagtgcatcgtattcaacgtatttcgtgggaacaaattgatgaaccagcttcattatctatgggactagaagaaacgacatctggtattgtaaaactagatggcaaaatcatcttactattagattatgaaaaaattgtatgtgaaattagcggtactggttatgacaataaatcaattgcagggttagaacaaaaaacagatcgagctgaaaaagtaatttatattgcagaagattcagcgatgctacgccaaatattagaagaaacattatcatcagctggatatacgaaaatgaacttcttcagcaatggtgcagaagcgttagcgcaaattgaaaaattagcgaaagagcaaggagagaaaatgtttgaacatattcacttgctaattacggatattgaaatgccgaaaatggatggacatcatttaacgaaagtggttaaggatagtgaagtaatgaatcgtttaccagtcattattttctcttcattaattacaaatgaattattccataaaggtgaagctgtaggagcaaatgctcaagtaagtaagccagatattcaagagctaattggtttagttgataagttagtgttgtaagaaaagcacttttttagctggaatagaggaactagctatgtgtggcagcggtcagtgcctaatagagacccatgcgatgtaagaccagagatatggagtgttttttaggtaaatgggacgagatagccgccgagatagctttagaagaagcgagacttcgattgaggatttgaagactgggtttataactctattctgttagagagaggaaggaattagccatgtgtagcattggctaattcctttttagtattctatactttaagctggcagaaaaatgaaaggtttctgaggtgtttggcgctgtatgtatgaaaaatcttcaaatgaagatttttgatttgaaaatataagcaaacgtattttgagggttattttagtaacatttcgtggtaacgcaaattttttcggtgaaaaaacatccaaaataccatataatataattaaatgtaattaatatgcaattttacatattaattaaaaaacattttccaaatttttatactttctatacatttttgtatgtttattatttgacagataatttcgaactgttataatatggatatgtaaaaattgctattttcttaaaagacatgggagtcagatgagaattgtgaaaggatgagggggagtggcacaaattatgtatcaccacacagcaattaatgtattaggtcttttacaaaacatgtcaaataataaaatgaacgatatgcaactagaggcggaattaaaaaaaatagaaaaagaattccaagtaaagtatgaagaattagttgatttacataatagaatggtattattccaaatagatatagaaaaaaatggcgggatgcgagcatatgaaaaatcagcaattacatggctgaagtctgaactagtgctactgtatgaagtgtatcaattttgtcaacgtcacggtttaaacattttaaatatttcaaaatacgtaagtaaaaatgaactaaatctttttccaaaaacagaaagtcaattgcaaaatacgtattataaattaaaaaaacgtgaaataccgtttgaaaatattgaaaaacaaaaaccaggacgaaagcgaaaatatataccagtaaaagagacaatcgttgcaagaaaacaagaaaacgagtacgaattaaaagaagaaatccagcataaagaggatgaaaaaaatcttgtaacagttatatctggtatcgttgataactttgaaacaattaatcaatgtagtgaaaggaaagaagacgaactacatcagtttatggaaggtatttataagctttctagcatggcagcaggacgttctagagaagcaaagaatacacgtagtctagaaggtgaattgcagtcgttacaactagaaaatgaaaggctaaaacgagagaaagaagagcttgtacaagatattaaaggcatgacgcagcttttaattcatttcattacaagttctgatatcgatcaaattcgtaaattaccaactttcgtacaagattgtaaaatggaattacataaactagggctatataatgcacaagacggtaaaatgaaaattatggttgatcgtagtggacaggttatgactgtcacgcagtaataaaatttgggtacaaaataaaagggaggtacatagtttatatgtatttcccttttgttttgtatggaatcgttccaaagatggaagatgaatgtttatgattgtagtagtctagagaccatttgcggaatttggttcgcttgtgaaaccatactaagtgcaacttcagtcaataatttgaactttaaaaaatcactcatctcctgcgccatgtctgcatcttcaacttgagatgcagcatctgttaacgccatactttgactatttaaattttcaatattaaattgtaaacgatttatcatagcaccaaggtcggcacgatgaagtgacacactttgcaaagcatcttcaattttaagaatcgccgctcttgcttcttgttctgttgaaatcttaatgtcatgttgtgtaggggaagggggaatatgtttcatcatatttattgtatgaccgatatcgtctaatgtaatagggcggttttgaccgtcaaatacagataaatcattaaactcagtcgtctcgccaatatagccaatttgttctgttaaagactgaaactctttattcagcgagtcacgatttttatttgaatttgtaccattcgcagattgaacagctaaatcacgcatacgctgcaaaatatttgacacagtttgaagagcagcttccgccgtgcgaagcatcgatatcgcatcctcattattacgaatcgccacgcgcataccacttgctctcgcgtgcatacgagtcacaatcgcaatattagcgggattatccgaagcgttgttcaacttcttaccagtcgccaaatgctccattgcaacattcatacgtttctcattctcatacaacgactgcctagcattcatacttaaaacattcgtaccaatacgcataatagacactccttatagattgatagagtcggtatcttttgatctaataaacagttatggaaggatagaggggcttatgcttatttactgtttgtgttttaacataagagggaatcaagataaaagcatcacggatactctcttccacataaaaaagaaagttttataaataatctatctatatagaaaaaataaacctctctgcaagcagagaggtttattcaggaaactaactcaaatggcttattgtaataatttagaaaccatttgtggtgtttggttagcttgagaaagcatgctgatgcctgcttcgtttaaaattttgaactttgtcatgttagacatttcttttgccatatcagcatcttcaatttgagaagcagaagctgccatattagtagcttggctcgttacgttgtttaagttatggtctaaacggtttaattgagaaccgaaagttgctctagcgtcagcatcttgagacgtccaagagttattttacaggtctctcatgaaagtaaaaaaattaagtttaaacatactatacgaggaggggatatgttgaaaaggatactgttagtttcaacaagtgctcatgatatgaatggacacccgactggtttgtggctggaagagctcgcagctccttatcatgtatttaaaaaggctaagtttgatgttgatattgtgtcaataaaaggtgggagagtacctatagatagagtgtctattccgaatggtatacctcgcgaattcaagcatgtagcttctttattgcaaaatacgaggccgatttcaaatgttcatttttcggattatgatgcggttttatttggtggtgggcacggggcgattgtagattttccaggtaatccatatgtagcaaatttgattgagaatatgtataacaataaccggattgtagcggctgtttgtcacggagtaagctctttagtcggtgtgaaaaataaggatggctcgttttttgttgcgggtaagcgtataacaggttatacaaacgatgaagaaagagctgtacatttagaaaagcgcgttccgtttttgttagaaagtaagttgaaagaagaaggagctttgttttatgtagcccccaattttacgccgcatgtagtagtagatggtcatttaattacaggacaaaatccacagtctagcgtggaaataggtaaggctataaaaagggctgtaaataaattatcgtcattttaatttctgctcatttcttcttattaacgggaatgtcttcttttcaaaaaaagatggagcaatgaatatgcactttatatagaagaaaccgactttcttatagaaggtcggttatttttctatcttgcaaattacgaaaaaaaggagcaaaataaaaaaggtcctagtctatacatgggcaaatgaaaattttcatacagaagcatttgaagtgagtgaacttaaagtgtgtaaaatataatgataaacataaaagatgatgaatgagaaaacgggtgatgaagttgaatagagcaatcggtgttatcgattcaggagttggcggtttaacagtagcgaaggaattaattcgtcagttgccgaaagagcgtatcatatatttaggagatacagcacgttgtccttatggtccacgttctcgagaagaagtacgtcgatttacgtgggaaatgacggagcatttactaaatttaaatattaaaatgttagttattgcgtgtaatacagcaactgcagttgtattagaagagatgcaaaaacaattaccaattccagtagtaggagttattcacccaggatcacgtacagctttaaaagtgacaaacacgtatcacgttgggattattggaacgattggaacggtgaaaagtggtgcatacgaagaggcgttaaagtctattaataaccgtgttatggtagaaagtttagcttgtccacctttcgttgaacttgtagagagtgggaatttcgaaagtgaaatggcgtatgaagttgtaagagaaacgctgcaaccactgaaaagtaccgatattgatacacttatattagggtgtacacattatccgattttaggacctgttattaaaaaagtaatgggagataaagtgcaactaattagttctggtgatgaaacagcacgtgaagtaagtacaatcttatatcatagtaaaatgttgaatgaaggagaagaacaaagcgatcatctcttcttaacaacaggaaaaataggcttgtttaaagaaattgcatcaaaatggttcggtcaaccgattgaaaatgtgaagcatattcatttagaaaaagaataatagtagaatttatataagtgagctcctgagaaatcaggagcttttgttttatcttgctatttgctgggtagtaagacccctgctgattaaagtttcaatttataagaggcacagcttgttctaaaacgtgaaacagctcgtatacataatagtacaaacttagattttaggggggaatggcatgcctaaatccacttttaaatgggttgttggtgctactgtgagcgctgttttactaacagggtgtggctttataaatcaagagaaagcaactgaacaaattgatccaccaaaacaagttacgtatacagagggtgggaagaaagaagtagctaaaaaagataagcaagggcaaatggtaaatagagaactataccttgttgataaaaatggttatgttgtaccacaaacgttagctatacctactccgaaagcaaatgagactgtgaagcaaacgttagaataccttgtgaaagatggaccggtaacgaatttattaccaaatgggtttcgtgcagtcattccggcgaatacaacgatgaccttagatttgaaaaaggacggaacggcagttattgatttctctaaagaaatgaaaaactatgcgaaagaagaagagcgtcaaattgttgaatctatagcttggacgttgacgcaatttacagagataaaacaagtgcagttccaaataaatggtgagaaattggcaaaaatgccggttggtggtacaccgcttggtgaaggagtgagccgtgcaaatggtattaacttcgatgatgaacaagtaacagatgtaacaaatacaaaaccagtcacactgtattttatggcgcaaaataataataaacagcaatactacgtaccagtcacacgccgcgttgcggaaggtaaagaaaatgactatgcagcaattatagatgagcttgtaaaaggtccgatccatcaatcgctcctaaatgattttaatccaggcgttaagcttattacgaatccgaaattacaagacggaaaccttacattaaactttaatgaaaatatatttgtaaacccagataaaaatatgatttcaaattacgtattgaagtcgttagttttatctttaacagaaaagaaaggtgtgaaaaatatttctattgaagtaaatggaaaagcaaatcttatagatgaaaagggcggaaagttaataaaacctgtagatcgtccagaaaacgtgaatacaggtagtttttaatcttgaataatttgatatacttaagtaagaaaggagaattgctttttgggttctccttcttttattgtatacatatcatacatttaaatttggctatactaacgagtagtaattaagaggaggttatttttatgcgagtagatggtagagagaaaacagaattacgccatatacatattcatacgaattatttaaaacatccagagggatctgtattaattgaagttggggatacaaaggtgatttgctcagcaacaattgaagagcgtgtaccgccatttatgcgtggagaaggaaaaggatgggtaacagctgaatacgcgatgattccacgtgcgacagaacaacgtacaattagggagtcaagtaaagggaaagtaacaggacgtacaatggaaatccagcgcttaattggacgagcattacgtgcggtagttgacttagaagcgcttggtgagagaacggtttggattgattgtgatgttattcaagcggatggtggaacgagaacagcttctattacaggtgcatatgtagccatggtattagcgtttgagaagttattacaagtagaaaaagtatctaaaattccagtaaaagattatttagcagcaacgtcagtagggattgttgaagaacaaggtgttgttttagatttaaactatgcagaagattctaaagcagacgttgatatgaacgtgattatgactggaaaaggccagtttgttgaagtgcaaggaactggagaagaagcgacgtttagtagagcgcagttaaatgaactacttgatgcagcagaacaaggcattttccaactgattgatatgcaaaaagaagcgttaggtgacatcgtatctcatatagagtagaggtggaaaaaatgaaacaagttgttgtagcgacaaaaaatatggggaaagtacgtgaatttgctgagttatttgagcgatttgatttagaagtgaaatcattacacgattttcctcatattgaagaagtcgaagaaactggtgaaacatttgaagaaaatgcgatcttaaaagcggatagtttgagtagacagttgaatgcaattgtaattgcggatgattcaggtcttattgtagatgcgttaaacgggaaaccaggcgtgtattcagctcgttttgctggagagccgaaagatgatcaagcgaatattgataaagtgttacaagaattaaatgaagtagcgtttgaaaagcgtaaagctcgtttctattgtgcattagcagttgctttccctgaaggtgataaaaagcctgtcattgtaaacgggacatgtgaaggatttattttagaacaacgccgcggggaaaacggctttggatatgatccgattttttatgtggaagaatataaaaaagcgatggcggaactaagttcagatgagaaaaatgctattagccatcgtggccgtgctcttcgtaaattagaagaaaaaatcccggaatggtttttaggagaataagggagagagaatgatgaaagctttaatcgtaagtgatagtcatagctctgtgaaggaattacagcagttgaaagagaaatatgaagggaaagtagatatcatgattcattgcggtgattcagagctaacgcctgctcatgaagaactgcaaggtttccgtgttgtaaaaggaaactgtgattatgctaactttcaagatgaaattgtaactgatgtagatggaattcgcttcttagttgtgcatggacatcgccataatgtgaaaatgacattacaaacgctagcgtaccatgctgaagaagtgggagcgcaagttgcatgctttggacattctcacgtattaggtgctgaattaatcgagggcgttttatttattaatccaggcagtattttattaccacgtcagcgtgtagaaaagacatttgctttattagaaatggatggaaatcaaatggaagttcgttttgaaacgttagacggacaactagttgaacaagcagtttttaaaagaggataagaaaatttatcctcttttaaaaaaggtgttgactttatgtgtggttatacatataataaatattgtcgatagggaaacggcgctaacgaagaaaagaaaataacatatgcgggtgtagtttagtggtaaaacaagagccttccaagctctggtcgagagttcgattctcttcacccgctccatgtcccagtagctcagccggatagagcatacgccttctaagcgtacggtcgggagttcgaatctctcctgggacgctaaaaaaaccttgttatcttttgataacaaggttttttgtttgtctaaaatttgatgtttgggttataggtgtagttcattcttgatatttgcgacctttcctttgatattaagtagttgcatatgtacttctttttcttaaataaaaagagcgccatttatgcgccctattcctcttatttaatttaaagaatcaataggtttatgatggaactcaaatccatatccagattctcttaattgtttacttacaatattataaaactctttaccattctagtacaattcagcagcagttatcggaacttattcccggtagtgtgttacaattaatagaagcggaaaacgagaatctccaattgactggacctgtgattggttagatggtttaagaaggtcgtataaaaaagggagatggcgcaaagatggcgagatcaaatgagaatgatttaacggagaaattggcggaaggtcaccggaaatatggtgatggcaattttacagtacagaacatcggtgatgaaactaacccgaattggactgtcgtaaaaaatgtgaggaaaggatcggcaggcattcgcgaaggagaagatatattaagactgcgatcaaaatatataaaatagtacggaaatgggcggagcgggagttcgaatctctcctggggcgccaagaaaaccttgttatcttttgataacaaggttttttgtttgttttaaattagttgttaataaacttgtcaaagacaaaaccataatctttcacattatattgtttcttcgtatcaacgagccagttaaaggcaatctcgttcatctctttaaattgctctgctaagtttacttgtgcgtttgaaatacggctgaaagcgttagatgccatatctaaacttttgtgtgcatattgtaatgtaatatcgttgtcgtatgaaatttcttcaattttaagtaaagctttatataaatcttttaattcttcaatatgttttttatggacatcaattgaatagtgttcatcgcccatttggaacttaatttctacatctaaatcaatcgttcccgcagtttcaagcgctacgtttttaatttgatatttactatagctaaagcggcgtagtgtacgttttttacttgttgcgcttgtaccgtctaagtgaattaaccctttgtttgtgaagcaatattcatctgatttcgatttaattagaaagtaaattttctccccatcttcatgcattacataatcatcggcatcgaccttatcatagtctttaggtgtaataacagaacctacatcgcttagtcctaatacatctgcggccatttttttaaacatatataatcccccttgtaaattaaagtcttaattgtacaaaaatatattaacatgatcttcatcctttgttttcttgtaatacgaaaatatctgaaggtaagttaagaaaagtaatgaataattattttgatcctaaattatttagtaaatctattagtttaagagtggattctccgaaaaataaccaagagaaaaaagttaattttgcaagtgattataaataaattccgtgaaagcacctcaagcgatatgaggtgtttttcaatctctttttgaaatcttacaattctgtaaggtaactgtaaggtagttcgatggtaagaaattgctaatcttttataatgaagataacaacgataaaacgaggaggcagaaatgatgaaaggattagttgtaacgggcttgacggttgcttttggatttgtagcgtatgagaaattaacgtatgtagttgatgttgtgaaacatttgattgcttagagaaaacagccatgagagggaaagggaatgagtgaatgaatggaatggttatttggaattataggtacttgtagtgtagtgttattgttctttgtcccaagtggtatacttagttcgacaacaagtttgttcttcttaagtttgtttgcttgtacgatgcttattattatgtttttaatgaagcgaagtaaaccaatcttctattttagcatgattgttatggcaattattgttctccaaattattacccttgtaatataccccacaattataaaagctttccattaatgatgaatcctctgcgtttgttgctggggatttttacttgtacaattttaatttttagtagagatttatttgtattggaatgtaaaaattaaatatttttatatttcaaacaaataatttggggatgttgtgttctcattacgcatttgatatatttactttgaacataattaaaatcaagaaaaagaggcggacgtatggataaaaaagaaaatacggtcgtattgtttccgcagctatcagagcgctatattgatgaaggttttttagcgttgaaagagcggaagttcgaagatgcattgcgctgctttgaaatattacgtcagtataatgcggaaacggaacaaacggaattagcttcagttatttgtttactcgaattaaaacgtatggaagaagcgaaagacaaatgtgaacagttgcttaaaacaggagttgtcttatttggtgatattcttgaaacgtacgtgactattttagttcaaacaaatgattatgaaggtgttattgaaactgttgaaaaggttttacaaacgaaagatataatgcctgatcaaaaggaaaaattagcgcagcttgctttatttgcagaaggtatgctaaatgagggagacgcatcgctagtggattcaaattttgagttgaatgagtttactaatgaaatttttggagaaaactttggacagaagctaagagcgattcagcgactttcattaaaagacttagatcttgcattacctgttttaaagaaatttttaatagatgaagagcaacacccctatttgaaaacttctattttgtataaaatgatagaaagtcaggtagaagaggaaatagaggtggaaaagtttgggaatgcaattaaggtaattccggcatttacaggtcataatgaggagcaatccaataacattatacataaattatcaagtcgattagagcaaaaatatcccgatatatttgaagcgatggttacatattggaaagaattgcaaattagcattttcccattcgctctattaatggataaagaagagatttggtcagctgttttagagagaattggaagaaagcgtttcggattggctattgatgaagaagagcttatggcagcatacaatatcgaattggaagagtttcatattgcctatcaatggttattacgtgttgaaagagaaggatatttgcccgtataattatgaaaaagaatcgttcagttcttgaaacgagcatattctatgttataatgtaagggttgcaaaaggcagaaaactgcctgtttgtaagagaagagaagtgtaattctcttacttaatatgtttcatattattctcgaacaaaatataccgtagttgtcttctgggcaattagtagattggaacattatatctgaaagcttttgctagaggattatttgtgtatttgttatttcaaaaaagagataatgaagatcttaatctatagaggtatgtgcatacattattatagttggagggaaagaataaatgtctacaaaatgggaaaaattagaaggtaacgttggcgttttaacaatcgaagttgatgctaaagaagtaaacaactctatcgacgctgcgttcaaaaaagtagtaaaaacaattaacgtaccaggtttccgtaaaggaaaaatgcctcgtccattattcgaacaacgctttggtattgaatctttataccaagatgctttagatatcattttaccaaaagcatacggtgaagcgattgaagaagctggtatcttcccagttgatcatcctgaaatcgacatcgagaagttcgaaaaaaatgctaaccttatcttcactgcaaaagttacagtgaaacctgaagttaaattaggtgagtacaaaggtttggcagtagaaaaagttgaaacaactgtaactgacgaagatgtagagaacgaattaaaatctttacaagagcgtcaagctgaactagttgttaaagaagaaggaactgttgaaaacggtgatacagctgtaatcgacttcgaaggtttcgttgatggcgaagcatttgaaggcggaaaaggcgaaaactactctctagcaatcggttctggtacattcatcccaggtttcgaagagcaagtaatcggtcttaaatctggtgagtctaaagacgttgaagtatcattcccagaagagtaccatgctgctgaattagctggcaaaccagcaacattcaaagtaacaattcacgaaatcaaaacaaaagaacttcctgagttaaacgacgagttcgctaaagaagcagacgaagcggttgcaactcttgatgaattaaaagcaaaacttcgcacaaacttagaagaaggcaaaaagcacgaagctgagcacaaagtacgtgacgaagtagtagaattagctgctgctaacgctgaaatcgaaattccagaagctatgatcaacactgagttagatcgtatggttcgtgaattcgagcaacgtttaagccaacaaggtatgaaccttgagctttactaccaattcacaggtactgatgctgacaaattaaaagagcaaatgaaagaagatgcacaaaaacgtgtaagaatcaatcttgttcttgaagctatcattgaagctgaaaacatcgaagttactgaagaagaagtaactgcagaagttgaaaaaatggctgaaatgtacggtatgccagtagacgctatcaagcaagctcttggaagcgtagacgctttagctgaagatcttaaagtgcgtaaagctgtagacttcttagtagaaaacgctgcataataaaataacaaggcacgattaaaatcgtgccttgttttataaatatagaaatatatttataaaacttttcgatggagaaggaaaagttcctttacaagtcgaatatacatatttcaaaagttttaaaaattttttatttgtacataactagtcatattatttgtatttctcgccacgtagtgacataatatgtatttacatacgatacatttatcgtgtacatacgaaggcaagaggttagcactttgtaaggggtgtgaaaatatgtttaaatttaatgatgaaaaagggcaattaaaatgttctttctgtggtaaaacacaaacgcaagttcgaaagttagtggcaggtccaggtgtttacatttgtgacgagtgtatcgaactttgtactgaaattgtacaagaggagcttgcgaaggacgaagaagtagaattcaaagatgtaccgaaaccggtagaaattcgtgaaatcttagatgagtatgtcatcgggcaagatagcgcgaaaaaagcactagcggtagcggtatataaccattacaaacgcattaattctaacagcaaaattgatgatgtagaattagcgaagagtaatatcgcacttatcgggccaacaggtagtggtaaaacattacttgcacaaacgttagcgcgtattctaaatgttccatttgcaatcgcggacgcaacatctttaacagaagctggatatgttggagaagatgtagaaaatatcttactaaaattaattcaagcagctgattatgatgtagagaaagcggaaaaaggaatcatttatattgatgagattgataaagtggcacgtaagtccgaaaatccatcaattacacgtgatgtatctggtgaaggtgtgcagcaagcacttctgaaaattttagaaggtactgtagcaagcgttccacctcaaggtggtcgtaagcatccgcaccaagagtttattcaaattgatacaacgaacatcttattcatttgtggtggagcgtttgatggcattgagccgattattaaacgtcgccttggtgaaaaagtaattggatttggttctgagaagaaaaatgctgatgtaaatgagaagcatgttttatctcacgtattaccagaggatcttttaagatttggtttaattccagagtttatcggtcgtcttccagttattgcgaacctagagccacttgatgaagatgctcttgttgatattttaacgaaaccgaaaaatgcacttgttaagcaattccaaaaactattggagcttgacgatgttgagttagagtttgaagaaggtgcactaatcgaaattgcgaaaaaagcaattgaacgtaaaacgggtgctcgtggacttcgttctattattgaaggcttaatgcttgatgtaatgttcgaacttccatctcgtaaagatatcgagaagtgtattcttacaaaagaaacagtagctgataatgagccgccaaaattggtgttacaagacggtactgtacttgatacaaaaacatctgcataatgcgaaagggaaacagcaatttttataattgctgtttttctttatgtttagctacgttcctccgcggaaatactaagagataaaatattgcgggaggaaataaataatgagctggacaaatatatttttagttgttcaacttgtttttggtgtaattgtcggattgtatttctggcatttacttcgaaatcaacgaacacaaaaagtttcaattgatcgagaatcgaaaaaagaattagaacagcttcgtaaaatgcgtgagatttctttaacagagccgctagcagaaaaggtgcgtcctacaacctttttagatattgtagggcaagaggacgggattaagtcgttaaaagcggctctttgtggtccgaatccgcaacatgtaatcatatatggcccacccggtgttgggaaaacagcggcagcacgtcttgtattagaagaagcgaaacgaaatcctaaatctccatttcgtacgaatgcaacatttattgaacttgatgcgacaacagctcggtttgatgaacgtggtatcgcagaccctttaattggttcggtgcatgatccgatttatcaaggtgctggggcgatggggcaagcaggtattccacaaccgaaaaaaggtgctgtaacagatgcacatggtggtattttgtttattgatgagattggcgagctccatccgattcaaatgaacaaaatgttaaaggtgttagaagatcgaaaagtatttttagaaagtgcgtactatagtgaagaaaatacaatgatcccaacatatatacatgatattttccaaaaaggcttaccggcagattttcgcttagttggagcaacgacacgttcgccagaggaaattcctcctgctattcggtcacgttgcttagaagtatttttccgtgaattagatacggaagaaattcaaaaagtagcgaaaaatgccgcggaaaaagtagaaatgcaaataggtgaaaatggtattgagatgattgggatgtatgcaaggaatggacgagaagcgattaatctcgtgcaaatctctgcgggtatggcgataaatgaagaacgttctttcattaaggatgaagatatagagtgggttgttcactcaagtcagcttacaccgaaatatgaaaagcgcatttatccgattccaaggattggtcttgtaaatggtcttgctgtatacggaccaaatacaggtgcgttattagaaattgaagtaacagcaattccggcgaaagataaaggatcggtaaatgttaccggaattgtggaagaagaaagtattggtagtcaaacgaaatctattcgtcgtaaaagtatggcgaaaggctctgttgataatgtattaacagtacttcgttctttagatgtgttgccagaaggatacgatatacatattaattttccagggggtatcccaattgatggcccttctgcaggaatcgctatggcaacaggtgtatattctgcggtgcatcgcacgtatgtaaataatgaagtagcgatgacaggtgaaataagtatacacggagaagtaaagcctattggtggtgtatacgcaaaaataaaagctgcgaaaaaagcgggagctaagaaagtcattattcctgctgaaaatatgcaaccatttttgtatacgatcaagggaattgaaattattcctgtccgtaagttaaaagaagtatttgagttaacgtttatgcaaggaaatatgcatagagagctagatgtacatactaacgtagacgaaacagatgcacaatctatgtaaaaataaacaataataaaatttgccagacttcgtttaagtttgtatgcttaatcggagtctttttcttttcgtgaggtagaaaaacaagctatttacaattgcgcggaatctcagcaattgcatctaggtgtattgtaatataaaatagttgaacaggagtttaatttattatggaggtgctatgtctagtatgaatacgaacgaaagaatcgtgcccctcctaccattaagaggcgttctcgtatatccaacgatggttttgcatcttgatgtaggacgtgataaatcgatacaagcactagagcaggcggcaatggatgaaaatatcatctttttagcaatgcaaaaagaaatgaatatcgatgatccgaaagaagatgacatatatagtgtaggtacagtggcgaaagtgaagcaaatgttaaaattgccgaacggtacgcttcgtgtccttgtggaaggtttacatagagcagaagtaatagagtttatcgaagaagaaaatgtagtacaagtgtctattaaaacggtaactgaagaagtagaagatgatttagaagagaaagcttttatgcgtacgttactggagcatttcgaacaatatattaaagtttcgaaaaaagtttcaaatgaaacttttgcaacggtagctgatgtggaagaaccagggagattagctgatttaattgcttctcacttgccgattaaaacgaagcagaaacaagagattttagagattgtatctgtaaaagaacgattacaaacacttatttcaattattcaagatgaacaagagttacttagcctagaaaagaaaattgggcaaaaagtgaaacgttccatggagcgcacgcaaaaagaatatttcttacgtgagcaaatgaaggcgattcaaactgaacttggcgacaaagaaggcaagggcggagaagtagaagaacttcgtgagaaaattgaacagtcgggaatgccggaagaaacaatgaaggctgccctgaaagaattagatcgttatgaaaagttaccagcaagttctgcggagagtggtgttattcgcaattatattgattggttattagcgcttccgtggacagaggcaacagaagatataattgatcttgctcattcggaagagattttaaataatgatcattacggtcttgaaaaagtgaaagagcgtgtacttgaatatttagctgtacagaagttaacgaattcattaaaaggacctatcctttgtttagtaggccctcctggggtcggcaaaacttcgttagcgcgttcaattgcaacatcattgaatcgtaacttcgtccgtgtatctcttggtggtgtgcgtgatgaatctgaaattcgtggtcaccgtcgtacatatgttggagcaatgccaggacgcattattcaaggtatgaaaaaggcgaaaacagttaatccagtcttcttattagatgagattgataaaatgtctaacgatttccgtggagatccatcagcggcattacttgaagtattagatccagaacaaaaccataacttcagtgatcattacattgaagaaccatatgatctatcaaaagttatgtttgtagcaactgctaatacactttcaagtattccaggtccattacttgaccgtatggaaatcatttcgattgctggctatacagaacttgaaaaagtacacattgctcgtgagcatttattgccgaaacaattaaaagaacatggcttacgaaaaggtaatttacaagtgcgtgatgaagcgctgcttgagattattcgttattatacacgtgaggctggtgttcgtacgctagagcgccaaattgcaaaagtttgccgtaaagtagcgaagattatcgttacagcagaacgtaaacgtatcgttgtgacagagaaaaagattgttgatttacttggtaaacacatattccgttatgggcaagctgaaaaaacagaccaagttggtatggcaacaggtctagcttacacagcagcaggcggcgatacacttgccattgaagtttctgtagcgccaggaaaagggaaactaattttaacagggaaacttggggatgttatgaaagaatcagcacaagctgcgtttagttatatacgttctcgtgcagaagagcttcagatcgatccgaatttccatgagaaaaatgatattcatattcacgttccagaaggagcagttccaaaagacggaccgtcagcaggtattacgatggcaacggcacttatttctgcgctaacaggtattcctgtaagtaaagaagtgggtatgacaggtgaaattacacttcgtggtcgtgtattaccaattggtggtttaaaagaaaaaacattaagtgctcaccgcgcaggcttaacaaaaattattttgccagcagaaaacgagaaagatttagatgatattccagagagcgtaaaagaaaaccttacgtttgtgcttgcatctcatttagatgaagtattggagcacgcattagtaggagtgaaacaatgaaagtaacaaaagcagatattgtaattagtgctgttaaaccagaacaatatccagacagtgatttaccagaaattgcattagcaggtcgttcaaatgtggggaagtcttcctttattaataaaattttaaatcgtaaaaagttagtgcgtatttcttctaaaccaggaaaaacgcaaacgctgaactttttcttaatcaatgagatgatgcactttgttgacgttccaggttatggatatgcaaaagtatctaaatcagagcgcgctgcatgggggaaaatgattgaaacgtactttacaactcgtgagcaattagacgcagctgtattagtagttgatttacgtcaccaaccaacaagtgatgacgtgatgatgtatgatttcttaaagcattatgaaatcccaacaattattattgcgacgaaagccgataaaattccgaaagggaaatggcaaaagcatttaaaagttgtaaaagaaacgcttgctgttgaaattggcgatgaaattgttctattctcttctgaaacaggacttggaaaagaagaagcgtggaaagcaattcataaatttacaaaaacaaaaaacgcgtgacgaatgtcgcgcgtttttgttttgctaaattttttagcgtacgtttaatgtaacttcaatatttcctcgtgttgctttcgagtaaggacatacaccgtgagccgcttctacaagttcttgtgcttcgctatgtgaaacgccagccacatgtacatcaagtacagcagatagaccgaaaccaccatctgtatcttttccgatagaaacgtgagcagttacttctgtactttctactttcacacgttttgtacgaatgacaagttgtaatgcactatcgaaacaagctgcataaccagctgcaaatagttgttctggatttgttgcttctccgcctgcaccacctagtgctttcggcatttttacatcaagatttaatatgccatcatctgaaactactttcccatttcttccacctgttgctgttactgaagcagtatataatttatccatatttattccccttttccatcattaattgttttcattgtgtcaattagtttatttagttgaattaataaagagcgatattcttgctctgtaattcctaagtttgtagccatcgttgtcggtaatgaacaagccttttcctttaaatcgttgccttgttctgttaattcaatacaaacttttcgctcgtcttctttggaacgaacacgttttacaagttttaatgattccatgcgttttaacataggtgttaacgtaccagaatctaaaaatagacgttctccaatttcttttactgttagtccatcttgctcccatagtacgagtaaagtaatgtactggggatacgtaatacccatttcttctaaataaggtcgataaaaacgagtaacctctctagagcaggtgtaaatagaaaaacaaagttggttatctagatgcaaagagtcctctgtcataaataactcccttccaattaagttgtgcacaatttaattttgtaaaaccaatataacgaaaaagaaatacaatgtcaaatacattgtattgagaaagtctttgttgcattttggaacaatcatacatattttccttcatgatgaaagaagatagggaagatgatgttataatttatatggaatagtttccatcacttgattatgagggctttttttggtaacgtacaaatagagttattaatttataatcattataaagtagaagtttttttattagtgttactgaatctcctttattacatacggagaataattaaaaaataatcggttgttcacacgattgtcagattcataagaggaaagttgtattatgatagtagataaagtgataaaacgggtgaagggggacatgctgcgtgcatattcttgttgttagtgtaaattatcgaacagcccctgtagaatttcgtgagaaactcacatttcaggcagcagaactagagcgagcgatgactacattacaaaatcaaaagagcgtgttagagaatgtcattgtatcaacttgtaatcgcactgagatttatgctgttgtcgatcaattacacacgggacggtattatattaagaagtttttagctgattggtttcagcttgaaatagaagaagtcgcgccatatttaactatttttgaacaagatggtgcaatagatcatttattccgcgtaacgtgcggtttagattctatggtagtcggagaaacgcagattttaggtcaaataaaagatagctttttagaagcgcaacaagttaaagcaacaggcacaatttttaatgaattgtttaagcaagtcattacattagcaaaacgtgcccactcagaaacaacaatcggggaaagtgcgatgtctgttagttatgctgctgttgagcttggaaagaaaatatttggcgagttaacagattgtcatgtgcttattcttggtgctggtaaaatgggcgaacttgcactgcaaaacttatatggaagtggtgctcgtaaagtaacagttatgaataggacgctttcgaaagcagaagtaatggctgagaaatatatgggacatgcaaaatcgttaagcgaattacaatgtgcattattagaagcagatattttaattagttcaactggtgcatcggagtatgtcattacgaaagagatgatgacgaaggtagagaaaatgcgctctggtcgccctttgtttatggttgacattgcagtgccacgtgatattgatccagcgattgatgagctagaaggttctttcttgtatgatattgatgatttacaaggagtagtggaggcaaaccgtgctgagcgtttgaaagaagcagagaaaattcaatttatgattgaagaggaaattgttctatttaaaacgtggttaagtacacttggtgttgttccattaatatcagctcttcgtgataaggcacttgcaatccaaagtgaaacgatggtaagcctagagcgaaaaataccaaaccttagtgatcgtgagaaaaaagtcattagtaagcatacgaaaagtattattaatcaattattaaaagacccaattttagtagcgaaagaaatagctgctgaagagggagcgagcgaaaaattagcgttatttgcgaagattttcgatttagaaacggaagacgtagagagttgtgcggaagaagtagaacataaaaaagtgtggacaccatccgttccatctttataatttggaaggatgatcggatgagttttttaaataacagtattatttatcatattgcaattattttatatgcttgtagcattagtttatattttatagattatttccaaagtaaccgaaaggcgaaccgatttgctttttggttacttgcgattgtatgggtcctgcagtctatttttatgttgcttagggctacagattcagaaacgaatcctattttaactttattatcagggatttatttttatgtttggttattgattacgatgtcgttagtcattaatcgatttatgagaatcgactttttagtcttttttacaaatgttgttgcatttggcgtaagcgctttttctatttttacaccgctcggaaagatgtcgccagtacttgcggaacaattagtttcagaacttgtatacgtgcatgtcggtatggcaattatttcttacgcaacgtttactgtatcgttcattttttctattatgtacttattacaatatcgcctattaaaaaagaaaaaatggaatgcgagattaagaaggttagggaatttaccgaagctagaatctatgtcttacggattaaatttattttctgttccatttttcttactagcaattttattaggatgtatatggggatatacaaaattggataatttccattggtatgatacgaaagtaatcggatcttttgtcgttctatttgtgtattgcacaggtttatatttacgagcggcagatgtgttgcaaggtaagaaaattgtacagtggaatatcggatcgtttctcgtaatgctagtaaacatttttctattaagcagtttatccaatttccacttttggtatttataatgaggagagagaattatgcgcaaaattattgtaggatcacgaaagagtaaactagcattaacgcaaacaaactggtttattgatcagttaaaagccctaggtctaccatatgaatttgaagtgaaagaaattgtcacaaaaggtgatgttattttagatgttactctttcaaaagtaggcggcaaaggcttgtttgtaaaagagattgaacatgcgctacttacgaaagaaatcgatatggctgtacatagtatgaaagatatgccagccgtacttccagaaggtttaatgattggctgtacaccaaagcgtgttgaccctcgtgatgcttttatctcaaaaaatggagcatcgtttaaagagttagcggaaggtgctattttaggtacgagtagtttaagacgtagtgcacagctactcgctgcgagaccagatttacaagttaagtggattcgcgggaatatcgatacacgtttacgtaaattaaaagaagaagattacgatgcgattattttagcgacagctggattacaaagaatgggctgggatgatgaagttattacagaacatttagatgaagcgttatgtgtacctgctgtaggacaaggtgcattagcgattgagtgtcgtgaggatgataaggatttattacaattgttagcgcatattaatgatacgataacagaaagaacagtggcagcggagcgagtatttcttcataaacttgaaggtggatgccaagttccaattgctggatatgcaacccttacagaaaacgatgcaatcgaattaacagctcttgtcggctctatggatggctctgttttattaaaagagacagtagtgggtactaatcctgaggaagtaggattagaggccgcggaccgtttaattaagcaaggcgccaaagaactcattcttgctgcaaataaggagcaacaataaatatgaacgctctcgctggaaaaacggtattgattacacgtgcccagcatcaagcgaaacaaatgagtgtagcagtgaaagaaaagagcggaattccattggaaattccgcttttgcgtatggaaggtatgtctcataggcaaattcaacatattgaagagcagctacattcatacgactgggttatttttacgagcagaaatggtgtagctttttttatagatagtttaaaaaagaaactaccactaaccattaaaatcgctgcggtaggtgtgaaaacaaaattagagttagaaaaaaggggctatcaagttcattttgttcccacttcatttgttgcagaagcatttgcagaagagtttctaaaagaattaagtggaaatgaacgtattttatttccgaaagggaatttagcaagagaggtaattccggttgccctacgggaaattggtatttctctagatgagctaaccgtatacggtacgaaagtgaatatagaaaaaaagcaagagcttatagcggcattgaagttagggaaagtagacattattacatttacgagcccttcaactgttactagttttgttcgtttacttaagggtacaaactggagagaatggacaaaaaaatgtacaattgcttgtataggacctattacggaaaaagaggcaagtctttattttccgtctgttattgtgccgaaagagtacactgtagaagcattactacaatgtgtttgtgaatctataaaatgaaagaatggggatagaaatctatgaactctttacaatttaatcgtcatcgtcgtttaagacaaagcgggggcatgcgtgcgcttgtgcgtgaaacgtttttacatacggaagattttatttaccctatttttgtattagaaggtgaaaatgttcgtaatgaagttccttctatgccaggcgtatatcaaatgtctttagatttattgcaagctgaaatgcaagaagttgttgatttaggtattcgttctgttattgtatttggtttacctgctgaaaaagatgaagttggatcatcagcatattgtgatcatggaattgtacaacgtgctattcagcaaattaaaggtgatttccctgagctagtagtagttgcagacacatgtttatgtcaatttacaagccatggtcattgcggtgtaattgaagatggtattattttaaatgacgagtctcttgcagttcttgcgaaaacagctgtaagtcaagcgaaagcaggagcggacattattgcgccatcaaacatgatggacggcttcgtaacagcaattcgccatgcattagacgaaaatggttttggacacgtgccagttatgtcgtacgctgtgaaatattcatcagcattttatggaccattccgcgatgctgcgcacggtgcaccgcaatttggtgaccgtaaaacatatcaaatggatccggcaaaccgtatggaagcattccgtgaagcagaatcagatgtaatggaaggtgcagacttcttaatcgtaaaaccagcgctttcttacttagatatcgttcgtgatgtgaaaaataactttaatttaccagttgtcgcttataatgtaagtggtgaatattcgatgattaaagcggcagcgcaaaatggttggattaatgaaaaagaagttgttcttgaaaaattaattagtatgaaacgtgcaggagcagatttaattattacgtatcatgcaaaagatgcagcaagatggttacaagaaggaggcgctaaataatgaaaaagtttgataagtcaattgcagcgtttgaagaggcgcaagacttaatgcctggtggcgtaaatagcccggttcgtgcctttaagtctgttgggatgaatccgttgtttatggagcgtggaaaaggctctaaagtatatgatatcgatgggaatgaatacatcgactacgtattatcatggggtcctttaattcatggtcatgcaaatgatcgtgttgtagaagcgttaaaatctgttgctgaaagaggtacaagcttcggtgcaccaacagaaattgaaaataaattagcaaaacttgttattgagcgcgtgccatcaattgagattgtgcgtatggttaactctggaacggaagcaacaatgagtgcactacgtttagctcgtggttatacaggtcgtaataaaatcttgaaatttatcggttgttaccacggtcatggtgattcgttattaattaaagctggttctggtgtggcgactttaggtttaccagatagtcctggtgtaccagaaggtgtagcgaaaaatacgattacagtagcttataacgatttagaaagtgtaaaatacgcgtttgaacaattcggtgatgatattgcttgtgtaattgtagaaccagtagcaggaaatatgggggttgttcctccgcagcctggatttttagaaggtcttcgtgaagtaacagaacaaaacggtgcattgcttatttttgatgaagtaatgacagggttccgagtagcttataattgtggccaaggttattatggcgtaacgcctgatttaacatgcttaggtaaagtaatcggtggtggtttaccagtaggagcatacggtggtaaagcggaaattatgcgccaagttgcgccaagcggaccgatttaccaagctggtactttatcaggtaacccacttgcaatggcggcaggttatgaaacgttagtacagttaacgccagaatcatatgtagaatttgagcgtaaagctgaaatgttagaagctggattacgtaaagcagctgaaaaacatggcattcctcaccatattaaccgtgcaggctctatgattggtattttctttacagatgaacccgttattaattacgatgcagcaaaatcttcaaacttagaattctttgcggcttactatcgtgaaatggtagaacaaggtgtattcttaccgccatctcaattcgaaggtttattcttatcgacagcacatagtgatgcagatattgaagcgacgattgcagcagctgaaattgcaatgtcaaaattaaaagcgtaatgtattagagaaaatcgctctccataaggggagcgatttttttattcataaagtaagctttccgcacataaatctgtaatgacatatagtttgggagggggaaaagaagtggctgcagatcattcattacgattttcattaaaagaatctgtgtggttccaaaaaggacaggaagtcgaagaacttttgtcaatttcgttagatccagacgttgagatagaagagcttgatcatgaagtaatcgtgagaggacaattagatttaacgggagagtatgttgcacgaaaagatgattcagcgtattcattaagagaactatcgccagcaaagtcaattgattatgtagaaacaagagaagatggggttaatgaacttgttcattcctttccacttgaaatatcaattccgagaaatcgagtgaaagtaattgaagagctatatgtatcaatcgaggaatttgattatgaattaaaggaaaatggttgcttacaattattagcggatatatctattaccggtttgtgtgatgaagagagaagcgaggatgaagttgaagaggaagaaacggtgtatgctgagttagaagaagattcagcgcaagaggatgaaaatagaccggcgccgcatgtagaagaaccagcatataaggaatcagatgagtgggaagattacgcatttgaaccgttccaattagaggaaagaaaagagcaggaattagaagaagagaaaatagaagaacatgaatttgtggaacgtgaagaggagcaagaaacaacgccgcaatttgaactgttcggacgaaaagatttcaagaaagaaaaagcaaaaaagcaggaagaacaagaagaagagtactcacagcgagatgaaaatgcgctttatttaacaaaactatttacgaaagaaccggaagaagaatttacaaagttaagaatgtatttcgtgcaagaaggggatacaattgaatctattgcagaccgttatgaaacgtctgtacaaaatttacaccgtgtcaatcaaacagaagatatatttttaaatacggggcaaattatttatattcccgtttcaagggtaaagacgaaataaggaagtgagtgttttcactcacttcctttcttagaggctatgttttgaatagaaagggttattcgtatggatattgagttgcgaaatcactatgaacctatcgtgaggcaatatagattggatacgcagcatatggaagagcacggaaatgtaatgaaaatttatacgaatcaaggtccatatgcactcaagaaaatagaaggcagaaagttagagcggaataactttctgcatcatattcaatatttgaaggagaaaggtttttcaaattatgtacctatatatcatgcgacggatggaagttatattttaagtgacgggacgtataattattatttaatgccttggttagaacgtgcagaaggaaacggtgatgacaatgatcaataccataaaatgtttcagacacttggaacgttgcatcaaaaaactgtgaaggaagaaacgtatacggaagaagatttagaaaaacattatacaagtatatccgatcgttgggaaaatgatggtgagatgttagaagagtttctcgtagaatctgaatcaaaatggtatatgtccccgtttgaattgcaatattgtacgtactatcatcatgtaatgagagcgcgtgaatttgcaacgaagcaattaaatgagtggaacgatgcgatgaaagaaaaagagaaaacgcgtattacttttgtgcatggtaatgtgtcacttaatcattttttatttgactatgagcggaatggctattttattagtttagaaaaatcgaagtttgcaacgcctgtgcaagatatagtaggtttttattcacggtctttaaacacatatccaatcgcaagaagtgatcggtttgaatggtttcaaatgtatcaaaaaaatttcccttttacgaaagaagagcaactacttatgtttgcgtatatgacgtatccatcgcaatttattcggcaaatccagtcttataagaaaagaagagataatcgcaacgaggaaaatgaactgcgcggagtaaagagtttgcaacaatcgcattggctcgttagcaatatagaatatttcctgtcgcaattacaagctgcccagcaagggaacggataaagtaaaggcattctccgctgatgattagccttcaccaattgggcgtttacgggcagcagggctcccatctaacttctttgcttcagctgagttttgaggtggaggtcttactgcccgcaaatagcgggggaaagaagataagtagaggattctacttatcttcttttttttgcacgaaaagctgtagttttaaatttatcttgacgaataaggtttcgttttttacactattgtatataataattaacaatcatataaatgccttgaaggggaagagtataacatgaaacgtcttcagagaggagaatcattagctgagagattctctagatagttatgttagaaggtagccctggagcatcttttctgaacggaatagttcttattaggaaaagacggatttgtccgttatcaaattaagagtataagcaaattatgaatttgtttgtaaataaaggtggtaccgcgatgtccctcgtcctttttggatgagggacattttttattttaaggagggaaaataatgtcaaacacggaaaagaatttaccaactaaatatgatcatatgtccgttgaagaaggcctttatcaatggtggcttgaaggcaaatattttgaagcaacaggagacgagaagaaacaaccgtatacaattgtaattccacctccgaacgtaactggtaagttacacctaggtcatgcttgggatacaactcttcaagatattttaactcgtacgaagcgtatgcaaggatacgatgtactatggcttccaggaatggaccatgctggtatcgcaacacaagcgaaagtagaaggaaaacttcgtgaagaaggtatttcacgttacgatcttggccgtgaaaaattccttgaaaaagcttgggagtggaaagaagagtacgcttctcacattcgtcaacaatgggggaaagttggtttaggactagactattctcgtgaacgattcacattagacaaaggtttatcagatgcggttaataaagtattcgttcaattatacgaaaaaggcttaatttaccgtggtgaatatatcatcaactgggatccagcaacacgtacagctctttctgatattgaagtaattcataaagaagttcaaggtgcattctaccatatgaactatccgttaacagatggttctggtcacattcgtcttgcgacaactcgtccagaaacgatgcttggtgatacagcagtagcagttcatccagaagacgatcgttacaaacatttaatcggaaaaacagttacacttccaatcgtaggccgtgagattccgattattgctgatgagtacgtagaaaaagatttcggaacgggcgttgtaaaaattacaccagctcatgacccgaatgactttgaagtaggtaaccgtcatgacttaccacgcatattagtaatgaacgaagatggaacaatgaacgaaaaagctggtaagtataacggtatggatcgtttcgaatgccgtaaagaattagtaaaagacttacaagaagctggcgtattagtagaaatcgagccacatatgcattcagtaggtcatagtgagcgtagcggtgcagttgttgagccttatttatcaacacagtggttcgtaaaaatggctccacttgctgaaaaagcagtagcgcttcaacaaaaagaagaagaaaaagtaacgttcgtaccagagcgttttgaaaacacatatttacgttggatggaaaatattcatgactggtgtatttctcgtcaattatggtggggacaccgtattccagcttggtaccataaagaaactggtgaagtatacgtaggtacagaagcaccagcagatattgaaaactggaatcaagataacgacgtacttgatacatggttcagttcagcgttatggccattctcaacacttggttggccaaatgaagattcagcagatttcaaacgttactattcaacagatgcactagtaacgggttatgatatcatcttcttctgggtatctcgtatgattttccaaggtttagagtttacaggagagcgtccatttaaagatgtattaattcacggtttagttcgtgacgagcaaggtcgtaagatgagtaaatctcttggtaacggtattgacccaatggatgttatcgagaagtacggtgcagatgcaatgcgtttcttcttatcaacaggaagtgcaccaggtcaagatttacgtttcagcatggaaaaagtagaatctacttggaacttcattaataaaatttggaacgcatcacgtttcgtattaatgaacatggatgatatgaagtatgaagaaatcgatttaactggtgaaaaatcagtagcagataagtggatcttaacgcgcttaaacgaaacaatcgaaagcgtaacacgtaacatggataaatatgagttcggtgaagctggtcgttcattatacaacttcatttgggacgatttctgtgattggtatattgaaatggcgaaacttccactatacggtgaagatgaagcagctaagaaaacaactcgttctattttagcttacgtattagatcaaacaatgcgtctattacacccattcatgccattcgtaacagagaaaatttggcaacatttaccgcatgaaggcgagtctattacagtagctgcgtggccaacagttcgcgaagatttacaagatacggaagctgcggcagaaatgcaccttctagttgatatcattcgctctgttcgtaacatccgtgcagaagtaaatacgccaatgagcaaaaaagttcaaatgcaaattaaagcaaaagatgaggctgtacttgctcaacttacgaaaaacagctcttacattgagcgtttctgtaacccaagcgaattaacaattcaaacagacttacaagcgccagaaaaggcaatgactgcaatcgtatcaggtgcagagttattcttaccgttagctgatcttatcaatcttgatgaagagagagctcgtcttgagaaagaacttgagaagttcgataaagaagtagaacgtgtacagaagaaactttctaaccaaggtttcgtagcgaaagctcctgcagcggttattgaaggagagcgtgcgaaagagcaagattacctagaaaaacgcgaagcagttcgtcaacgtctagcagatcttgaaaagtaaaaatgtttttagagactcactatattggtgagtctcttttctttgcgtataatagaactatgaaagttgtctattgaaaggggaaaaacatacgtgatacatacatacgaagaagcgatagggtggatccatagccgattgaaatttggaattaaaccaggattagaaagaatgagatggatgttagaagaacttggaaatccagagcgtcatataaaatgtgttcatcttgctggtacaaatggaaaaggttcaacgttaacatatatgcgttacatgttagaaggcgcgaaatataaggtaggaacgtttacctctccttacatcgaatcatttaatgaacgcattagtgtgaatggaacaccaattgcagacgaagagattactgaacttgtaaagatggtaaaaccagtcgttgaaaaactagatgaaacggatttaggggaagcgacagagtttgaaattattactgttatggcgatttgctatttcggtaaagtcaatttctgtgatgttgttttatttgaaacagggcttggtggacgttttgactctaccaatgttatacaccctgtcctcacgattattacgaatatcggtcacgatcatatgcatattttaggaaatacactaggggaaattgcatatgaaaaggcggggattattaagtctggcgtgccggtaattactggtgtacaagatgaagaagctttgcaagtcattcaaaatgttgcaaaggaaaaccatgcaaacttatacgaacttagcaagcattttacagcgttacataaacagtctaatgaagatggggaacagtttgattttacttgtcctttttccgcatttgaagatttgcaaatctcaatgaaaggcattcatcaagtaggaaatgcagcgttagcacttatggcagtaatgtatgtaaaaacatatttatcatttttaattgaagaagaggaaataagaacgggattactggaagcatattggattgggcgctttgaaaagttgcaaagtaacccggatattattatagatggtgctcataatccagaaggtatcgaaagccttgtgaaaacagtagaagcgcattacaaagataaaaatgtaatagtgttatttactgctcttggtgataaacaattacataacatggtaggccaattagaaaccattgcagatgaaattatttttacaacattcgcctttgatcgtgctatttctgctgataagcttgcatcatattcacagaaagaatcaaaattagtttttgaaaattggaaagaggcaattgatacaaaagttgaaatgatagcagaaaatgatgtttttatcataacgggttctctttatttcatttctgaagtacgaaaatatattcgcgagaaaaactagatagtctttgctatctagtttttttgttctacaaatgaagtcaaatgcatacatataagataaatatatagggttatttggcgaattcctctgacaaatatctcgtttttttatgaaatgaatatgatatgatgcggacaacgataagaggtgaggtgtgagtgtatggacaagcaatcacgaacgatctcagtgaaagtgaatggaacagaagcgaagtatgaggaaaaaaagaaagatgaatttgaatggatggtagtagaaagtgaacgaccgaaaaatgttgttccgtttcaaaaagcgaaatcaatgtctgtggaaaaataccgaaagaagtggagtaatacattaattgtaatcgttgcaactgcaatcattatcggtacggcgtttggaatggggatgcttcatttacttactggacaaggaacgacaggaggaagtgaagtgacagcttcaaggccgactggaaatggagaatcaagggtgggtggaacggcagaacaaacaccagcaccgaaagaagaaaaacaaaaagcacaggcaggaacgtcattggatccgatgaaattattttttgttcaaggggggctttattcttctgaagaaaagggacaggcagctcttgaagaatggaaaggcaatgggggcattggtgctttgagaccgagcggtgataagtatgcaatagttgttggtattgctagcgatgaacagtctataaatcaattaatgactaagtataaaaatgatggtgtctccgttttaaaaaagagctgggatataacagataaagcattgctgaaagatgataaagaagtagggacatttttaacaaaagtgcagccattatacactcatttagcaaaatatgcttctagcgtacaagttggtggaaaaagcagcccaaaagatatagaagcaattgaaaaagaatggaaaaaggttgaaaaagaaggggaaagtatgaaacgagaagaagcaaagaaactgtatatgtatacgtcggtagctgtacaaacagtaaaagatgggaagatggataaggaatctttggcgaaattaaatcaagttattattgatggtttactctcgtatgaaaaaattgtttcgtagaaagtgaaatgataggataataaaatgagtaagaaagaagtacatgtacttctttcttttcttttgaatttagagcaaagtgctttctctatgatgggaatataatcgtatgcaataaagaagtgttattttagttagagaaattaatatttctttcatttgtgggcaaactattcctttgatacgattaatataaattgttctgcttcatgtgagaaaggaaggagaaaatatgagaaaaataattttagcttcaggatcacctcggaggaaggaattgcttgagttagctagtgtgccatttgaaatcgttgtaagtgaagtagaggaaacaattggtgcatattcatcgccttctgatattgtaatgtcgcttgccttgcaaaaagcatcagcggtggcagaaaataatagtgatcacattgtgttaggtgcagatacaattgttacatatgagtcgcgtattcttggtaagccttctaatgaggatgaggcgaaagagatgttacaattactatcagggaaaacacatgaagtgtatacaggtgttgcgattatagcaaaagaaaaaacggttactttttatgagcgtacagaagttacattttgggagttaacagaagaggaaattgatacatacgtcgcgtcgaaagaacctcttgataaagccggtagttatgggattcaaggtaaaggatctattttcgttcaaaatattcaaggggactactatagtgtagttggcttaccaatcgcacgcctcgttcgggaattaaaacaatttgatattgatgtaacccatgcgtaaaattgcatggggttttctttgagagaacaaataaaggggtggagagatgaacggtattcgtgatgttgtaagagaagaacagccacgggagcgtttattgttagaaggtgctggaagtttatcaaatcgagagcttctcgcagtgttactcagaacaggttctaaagaagaaacagttttaaagttgtcagataaaattttacaccaatttgatggcttacgtatgttgaaagatgcaacattagaggagctaattagtatacatggtattgggatttcaaaggcatcgcaacttatggcagcctttgaactaggcagaagaatggtacgtttagaatatcaaaatagatatagtattcgaagtccagaagattgtgcgaaatacatgatggaagaaatgcgttttttacaacaagagcattttgtttgtttatatttaaatacaaaaaatcaagttatacataggcaaacgatctttattggaagtttaaacacgtcaattgtacacccgagggaggtttttaaagaagccttccgtcgtgcagcagcctctatcatatgtcttcataaccatccctcaggagatcccacgccgagccgtgaagatattgaagtaacaaaacgcttagtagaatgcggccagattatcggaattgaagtgcttgatcatattataataggtgaccataaattcgtgagtttaaaggaaaaaggtcatatttaagactatgctttttacttattttgttttataatgtgatttatgagttttttgtagaaatttatctacaaaaaggataaagatataaaaaacgtactgtttttataatataaattaagaaaaaatgagtccgtgaaaacaagaaaggaagataaataatatgtttggatttggtggatttactcgcgatcttggaatagacttaggaactgcgaacacgcttgtatatgtaaaaggaaaaggtgtagttttacgtgaaccttcagtagtggcgttacaaactgatacgaaacaaatcgttgctgtaggtagcgacgcaaaacaaatgattggtcgtacaccagggaacgttgtggcacttcgcccgatgaaagacggtgtaattgctgattacgaaacaactgcaacaatgatgaaatattacattcaacaagctcaaaaatcaaacggtttcttctcacgtaagccgtatgtaatggtatgtgtaccatctggtattacagctgtagaaagacgtgcagtaatcgatgcgactcgtcaagcgggtgctcgtgatgcttatcctatcgaagagccatttgcagcagcgattggtgcaaacttacctgtttgggaaccaactggtagtatggttgttgatatcggtggtggtacaacagaagttgcaattatttctctaggtggtattgtaacaagccagtcagtccgtgttgctggtgatgatatggacgattcaatcattcagtacattaagaaaagctataacttaatgatcggtgaaagaacagctgaagcattaaaattagaaattggttctgcaggcgagccagaaggtatcgagcctatggaaattcgcggtcgtgatttagtaagtggtttaccaaaaacagtactaattcagccagaagaaattgcagatgcattaaaagatacagtagatgcgattgtagaatcagttaaaaatacgttagaaaaaactccacctgaattagcggctgatattatggaccgcggtatcgtattaacaggtggcggggcattactacgtaatttagataaagtaattagtgaagaaacgaaaatgccagttcttgttgcagaagatccattagattgcgtagcaattggaacaggtaaagcattagacaatatcgatcttttcaaaactgctgctcgataatattgcaaaataaaaatcagtgaaattaagagggtgtgaacgtgccacagtttttcttaaacaaaagattaattgttttgttggttagtattattcttctcgtggcattgattggaatctcattgaaagaacggaacagtttaacatggccagagcagtttgttaaagatactgtcggtgttgtagaacgtgtattccaaaagccagcgaaatacgtagctggattcttcgaaaatgtagaggatgtaaagcgcacgtatgaagagaataaagaattaaaagcaaaattagataattatgcaggtctatcagggaaagtaaaacaattagaagatgataacaagaagctacaagagctaactggtaaaaaagagttaaatagcgggtatactgaaattccagctactgttgtttctcgtaatccagataaatggtacgatttaattggaattgataaaggggcacagcaaggaattaaaaaagatatggctgtagtaacttcacaagggttagttggaagagtgaaaagtgtatctcagtttacatcatcagtagaattactaagttctatgagccgaacaaatcgtgtttctgctattgtacaagggcaagagaaaatctttggattgattgaaggttatgacaaagaaaagcaattacttcttttcacaaagattggctctgatgcaccggtagtgaaagatcaactagttgtaacatctggactgggtgatattttcccgaaaggtcttgtaattggaaaaatcgttgaagttcagccagatgcatatggcttaacaaaaacagcttatgtaaaacctgccgctgatttaaatgacgtagagcatattacggttgctaaacgtgcaacaccttcagcgccattagaataggaggagaagaagagatgatgaagatattaaaaagagcagctcttcctcttttgctcctttttgtgtttctatttgaaaatatgtttgctactgttgttccaacggatgtgttttggaaagacagcatagcagcaccgcatttctttataatcgtcttatgttttattacagtgtattatagtccggtccaagggatttattacggactattatttggcttcttatttgataccgtatacacagaacttgtcgggatatatatttttgcttatccgattttagcttatttagtatatagtgtgatgaaagtactacaattgaatttatttattgttgtttctatcatattagctagcgttgtagcactagagtattatgtgtatggattcttaactttattaggacgtactcatatgccagcgtatgtctttttcacagatcgtctcctttctactttattgttaaatgctattttcttattgatagtttgtttcccactgagacgatatatagtgcgtctttcaaaagcgatggaagaaaaagaaaaaaggattttctaattttatgtcgaattgaatcggtggggtgaactttagtggaagaaaaaaagcaacaaaatgtaacgataaaagggacaaaagatgggataacgcttcatttagatgattgttgttcattctcagaattattggtggaattagacgaaaaactttctacacattactacgatggtgatgggcgctctttaattgaagtgcatgtgaaagtaggaaatcgttatttaacagaagtccaacaagaagagattcgtacgttaattcgtaataaaaagaatcttgttgtggattcaattgaaagtgatgttatcactaaagcagaagcaatagcttggaaagaagaaacagaaattgtccctatttccaaaattgttcgctctggacaagttttacatgtaaaaggaaatttgttgttaattggagatgttaatccaggcggaacggttatcgctggggggaatatttttgtcgtaggatcattaagaggaattgcacatgctgggtattatggggattcggatgctgtaatcgctgcatctgttatgaacccgatgcaacttcgaattagtgatgtggcaatgcgggctccggaagagaaagaagacggagcggaggcggcagaatgtgcgtatattaatgagaacaatcacattgttgtcgatcgcctgcaacttctcactcatctcagacctaatttaacaaagttagaaaggggaattgtatagctgtgggagaggcaatagtaattacatctggaaaaggcggagtaggtaaaactactacatctgcgaacattggtacggccctagcgttatctggaaagaaagtgtgcttaattgacacagatatcggtcttcgaaatttagacgtagtaatggggctggaaaatcgtattgtatttgatcttgttgatgtcgttgaagggcgttgccgtttacctcaggctcttattaaagacaaacgttttgatgatctttatttattacctgcagcacaaacgagtgataaatcagcggtaacacctgaacaaatggatgaattaatacaagtattacgtcaagattatgattacatattaatcgattgtcctgcggggattgagcagggatttaaaaatgcggtagctggtgcggataaagcaatcgttgttacgactccagaagtatcctcaatgcgcgatgcggatcgtattattgggcttttagaaaaagaggatattgaaccaccgaaacttgttattaaccgtgtacgtagtcatatgcttcatgaacaggatatgttagatgttgatgaaattgtacgtacattgtcaatcgagcttcttggtgttgtcgaagatgacgatgaagttattcgagctacaaatacaggtgaacctgtggcgttgcaaccaagcggaaaagcagcgttggcttatcgtaatattgcaagacgcttgttaggtgagaatgtaccattacaagcatttgaacaagaaaaggtatcggtatttgcaaaggtgaaaaacttctttggaatccgttaagagcacttcgcacatatgcgaggtgctttcttttttcttcacacgaatatctttctttcttagctcatacatatgtacaaactgtatacaactgtttctaatgaaattagcttaacgaaagaaaggagacagtatgaagaatagacgcgtagaagaaattaaaaagcggattgcaaaaaggaaggccgagcaagaaaggatggaggaagagcagtattttaacggagggaatttcgatagtgaagcggtatttattgaagatggagaaaaggaaatgcatcctttatttcgaaaggaagtctttttcttcaaagttttattatcagcaatattagttctttcggttgctattttatataagaatgctccttcttcattcaatggagctaaagctgttacagaaaaagtgatgaaagaggaatttcagtttgctactgtagcgaaatggtatgaaaagcaatttggaaaaccgctcgtattctattcgccgaacgagaaaaaagaaggaagtattcagcaaaaggattatgcaattcctgcttctggaaaggtaatgcaagggtttcaaaaaaatggccaaggtgtatttgtccaaacagctacaaatgcaaaagtggagtcagtaaatgaagggttagttgtttttgcaggcaagaaagaggaacttggaaatacagttcaaattcaacatgcagatggtacggagtcatggtatgcaaacttaaacgatatgtcagtgaaattatatgattacgtttcaaagaaacaaaaaattggaacggtgagtaatgatacaaatgataaaaacggaaagttttatttcgcgataaaaaagaatgaaaaatttattgatccgatccaggtgatatcatttgattaaatatagggacgttttaacgaaaatttccgtgcatccattattttgggttattattgtcattggtatttttactgcgcgttttaaagagttactactgttattttgtattgttcttattcatgaacttgggcatgcttttgcagcagcacactataattggcgtataaaaagaattcaacttttgccgtttggtggcgtggccgagcttgaggaacatggtaataagtcattgaaagaggaacttgttgtcgtaattgcaggaccgattcaacatgtttggatgatgctggtaggttatatgttgttcgaagtcggttggctgaatacagatttatattatttctttatgtggaataatataattattttagcatttaatttactccctatttggccgttagatggcgggaaagtattgtttaatgtattatcatatcgtttcccttatttacaagcacatgaaaagatgatgcaattgtcatgtgttttttttggtgtaatattaggatggcagttactctggaatagtaacaatattatgatgtggatactactcatatttttagcagtgtcattatatcaagagtggaaacaaagacggtatgcatttatgcgttttttattagaacgttattatggaaacaaaagaggaatcgaaaagattgcacctattgaagtgcaaacggaagatcgtttatatacgatctttacaaaatttcgtagaggatataagcattctattatcgtccgtggaaaatataaagagcattacacattggatgaaaatgaattgctctatgcatattttactgaaaaacgaacaacttcatcagttgaagaattaatcggttagtgttgacgatagcactaaccttttattattgtaaaagcaaagaagattataaagtgaggaaataattttgaaaacgttatatgtgaattacgctggttcggaaaagcgcgttgcaattgaagagaagaaaaaaattgttgagtttttatggaaacgtaatgaagagcaagagattgttgggcatatttatgttggacgtgtcgtaagaacaattgctggaatgaatgcagcttttgtaaacatcggtttagaaaaacatgcttacctttcatacgatgatgtaccatcttcttatcgtatacatgaagggcaagcgatactcgtacaagttgtgaaagaggcaattgatacgaaagggcctaaattgacagcgaatatagaatttaccgggaaatatgtcgtttatatgccgtttgatgagatgcgcgctgtttctcgaaaaataaaaaataataaaagaagacaacagttactccaaattgaaatagagggaacggggggatacattttccgctctgcttctgaaaaaggagcaattgaagaaatacaagctgaaatgcaagggttacaacagttgtatgaagagttaaaaagaaaagagggccaaggaaaggcgccgttattacttcatcgaccggcgacctttttagatcgtgtatttcaagagaatccaattgaaaccattgaaaaagtagttgtagatacaagaagtatagtaaaagaattagaagacaaagttggaaaagaaaaagtatctttttataatgaaaagtcttcgatgtttaaccattttggaatagagcgtgaaattgagaaagcactccaaaaaattgtgtggcttccaaatggtgcttatttaattgtagaacaaatggagacgatgactgtaattgatgtgaatacgggcaagtttacgggaaaacaaaatttacaagatacagtacttcgcacaaatgagatggcagctgaagaaattgcacgccaattaagacttcgtgatattggtggtatgatattaattgattttattaatatgaaaaaaagagaagataaagaaaaggtaagagaatgtcttatagctgctatgcaagatgaccgcacatatacaagggtgctcggctttacggagctagggattttggaaatgacacgtaaacgtaaaaagcattctttacgggacgtattattaaaagagtgtgtaccttgcaaagcgacgggttatgtgatgtcgcatgaaacaattgcgtatgagttagagagagaactaatcacatatggcaatatagaagatgaagcggtattaatcgctgcgcctaaagaactgcaaaaacagtttttgcaaaaagaattacaaaaaaatattccatttgaaatttatttcaaagatgataatatcgaaaagtatgctatcgttcgttttggaagtaaaaaagaaattgtagagcggaaaaaatagttagcagaacatttattgacaaccgtctatgattcatgataacatctttatgttatagtttatagcacctaaacggctatatgctacaaccgcacaagacaggttccctaaaggcatttatgtctacctcgtttttggcgagtcttagtaattaagaggaggtgcaagtatgtacgcaattatcgaaacaggtggaaaacaaattaaagttgaagctggtcaagcaatctacattgaaaaattagatgttgaagctggtgaaactgttacttttgacaaagttcttttcgttggtggcgaaaacgttaaagttggtagcccagttgtagaaggtgcaacagttactgcgaaagttgaaaaacaaggtcgcgctaagaaaattatcgttttcaaatacaaagcgaaaaagaacaatcgtaagaaacaaggtcatcgtcaaccttacactaagctagttgttgaagctatcaacgcttaattctggttaacatgattaaaattacgataagtcgcacgaaattaggaagtatccaatcatttaaaatgactggacatgccgattatgcgccacatggacaagaccttgtctgtgctggaactacagcggttgtgtttggttctataaatgcagtggaagaactttgtaatgtgcaagcaactattgaactcggaagtgatggcggattcttaacatatgaattgcctaatgatttagacgttcatacagcagaaaaagcacaaacgcttttagaaggattagttgtttcgcttaagacgatcgaacttgattacggaaagtatatccgtttaatagaaaaagtgcaggaggtgtaacgtatgttaagattagatcttcagtttttcgcatctaagaaaggtgtaggtagtacaaagaacggtcgtgactctcagtcaaaacgtcttggtgctaaacgcgcagatggtcaaacggttacaggtggttcaattctttaccgtcaacgcggtacaaaaatttatccaggtgttaacgttggtcgtggtggcgatgacactttatacgcgaaagttgacggcgtagtacgctttgagcgtcttggtcgtgaccgcaaacaagtgagcgtatatcctgttgctcaagaagcataagaactcacggaaaactctaacctgagtgcaggttagagtttttctatattaaggggtatctaaatgaatgaaaaatggacaattatagatgcattgcgccattcaagacatgattggctcaatcgtatgcagatggtgaaaggaaacctttcccttggaaaagtggaagaaattcatagtctcatcgatcgttttgtccaagaagcgagacaagaatccaatctgatggggctatcaatgcctttattttcagagtggattttaacatataattggaaacagcagccgtgcttattggagtacgaagtattagggaaattacataacttatctcacttagatgagactgtatgtacatggacgaatcaatttttctcgatgcttcagcatagtttagacgtatatgttgaaaattatgtttgtatcacaattgaatgtgacgcggataatgctcgtttcttttttgattttcgtggtaagctaacgagtgtagaagaactacagaattggcttgcgacccaaaacaataaatggtattccatttcttatacagtgcgagacgaagaagtctcagttatattacaaccaattgaaaaaagtgtggtgaaataatgtttgtagatcaggtcaagatatatgtaaaaggcggcgacggtggtaacggtatggttgcgtatcgtcgtgagaagtatgtaccaaaaggtggcccagcaggtggcgacggcggtaaaggtgcagatgttgttttcgtagttgaggaaggcttacgtacattaatggacttccgctaccaacgtcatttcaaagctgatcgcggtcagcacggaatgagtaaaggtcagcacggacgtaaatctgaagatttacttgtaaaggttccaccaggaacagtagtaaaagatgaaaaaactggtcaaattcttgccgatttagtaacgcatggacaaactgctgtaattgcaaaaggtggccgcggtggccgtggtaactcacgttttgcaacagctacgaacccagcgccagaaatcgctgagaacggggaaccaggtcaagagcgtgatgttattctagaacttaaagtactagcagacgttggacttgttggattcccaagtgtaggtaaatctacattattatctgttgtatcatcagcgcgtccgaaaattgcagagtatcacttcacaacaatcgttccaaatcttggtgttgttgaaactggtgataaccgcagcttcgttatggctgaccttccaggactaattgaaggcgcacatgctggcgtcggacttggacaccaattcttacgtcatattgagcgtacacgtgtaatcgtgcatgttattgatatgtctggtttagaaggccgtgatccatatgaagattacgtaacgattaataatgaattaaaagaatacaatcttcgcttaactgagcgtccacaagttgttgttgcaaacaaaatggatatgccagatgcagaagaaaacttacaagcatttaaagagaaagtgggagacgaagtaaaaatcttcccaatctcagctgtaacaagacaaggtgttcgtgacttattgtttgaagtagcgaacttaatagaaacaacaccagaattcccaatacatgaagttgcggatgagtctgatacaagtgtaatgtacaaatttgatactgaaggtgttaaatttgaaattacacgtgaaagtgatggcacgtttgttatctctggttacgatattgagaaaacattcaagatgacagacttctcacgtgatgaatctgtacgtcgtttcgctcgtcaaatgcgcggaatgggtattgatgaagcgcttcgtgcacgtggtgcaaaagacggagatattgtaaaaattcttgaatatgaatttgaatttatcgattaagactgccgaaatacggcagtctttttttatatcgtaaaaatcggatttatataggaaaaaatccccactaattaaattttcaatttataataaaaaggggagtggttttagaagaatttttttatggggagaaaacgaacatgtataaaatattaattgtagaagatgatgagaaaatcgcgggaatattagaagagcatttagaaaggtatggctatcaatcatttagagcaagtgatttacgtcaaataaaagatgagtttgtaaaagtgaatcctcatctcgtgttacttgatattaatttaccgtactttgacggtttttattggtgtcgtcaaattcgtactgtatcgaatgcaccaattatttttgtttctgcaagaacaggagaaatggatcaagtaatggcgattgaaaatggcggcgatgattatattacgaagccattccatttagatatcgtaatggcaaaggtgaagagtgcacttcgccgtggttacggagagtatgcttctgccgctgagagtgattgtttaggtgtaaatggactgttgttattcccgtctcagcatattgttgagtggcaaggacaacaaactgaactgacaaaaaatgagttttacttattagagtgtttaatgaaacaggtgaatcaatatgtaacgcgcgaagaactgttagaagctctatgggatgaagtagcatttgtggatgataatacattaaccgtaaatgtaaaacgtgtaaggaagaaactagaggagttaggcattaaaaatgcaattgtaacgaaacgtggatatggttatgcgctttttacggagtggggcgaagggcatgaaggttaaaaattaccttatgggccgcttttctttaattctttcttatattgttagcctttgtttatttgggctcgttttacagctgcaaagtcttttagaaaagaaatccattgattggagtacgtggttatatggacttttattaggaacagttgtgtttactgtatacctcatttacgattaccgaaaacggagtgtgtttttaaagaggatcgaaaagtatgttactgatggaaatacattacatgactctttacttattgatgaatcttatacatcagagcaagaaatggtcgttgaatcttttacgttattaagacagcaatatatgaatgaagttcataaacagcatgcgaaagagcaacagcaaatgatatttatgaaccaatggattcaccaaatgaaaacaccagtatctgttattgaattattgctgcaaaagtttggcaaagagcatcgtgaggcaagagcaacagttgaaagtattcgtgaagaaaataaccgtatactaaatggtttagatttagcgttacatatggcaagactagagcagtttgcgaaagattataagatagaagtagtaaatgttatagatgtcgtgcgaggtattattaatgaaaatcggaaatcctttattcaatcgtctgtatttccgaaagtgatgtttgaagaagatacttgtatggttgcatctgatagaaaatggctgagtattgctataggtcaaattgttgtaaacgcaatcaagtatacaaaaatttcagcggcagagaaaaaagaaattcaatttcaaattgaagagaaaaatcaaaaggtgttattacatattaaggacaatggaattggtattccagagcaagacgtaaagcgcatatttgatccattttttacgggaataaatggacgtaaaacgagagaagcgactgggatgggcttatatattacgaaggaaatttgcgataatttacatcatggaatgtatgtccaatcggctgaaggagaagggacaacattcacgttccaatttgcaaaagatgaagaatatcatacattgatgagaaaaatgacaaaactgtaagataacaaaacgttttgtaagggaaatcactcgtttctttttcttatttttcttatagtaaatgtaagaagaaaacacgtagggggattagaaatgagtgttcttgaagtaaaaggattaacgaaggtgtaccaatcaaaaggttcagtagcgacgactgctttaaacgatataaattttaaaatagaagaaggcgaatttgtagggattatgggtccttcaggaagtgggaaaacgacgcttttaaatttattagcaacaattgataagcaaacttcaggtcatgtgcttgtaaatggtgaagaaattaatcaaatgcgtgctgcaaaattagcggagtttcgccgtacacatttagggttcatcttccaagattttaatttacttgatacgttatccattaaagaaaacattattttaccacttgtaatggcgaagaaatctgtaaatgaaatcgatgcgaaagtactagaaattgcgaagtttttaaacatcgaagaaattttaaataaaaaagtatacgaagtatctgggggacaacaacaacgtgcagcagcagcgagagcaatcattcatgaaccgacgttaattttagcagatgagccaactggaaacttagactcgaagtcagcaaaatcgctaatgggtgctctgcaagatttacacgagcaaaagaaagtaacgattgcaatggttacgcacgatccagtagcggctagttattgtgaacgtatccttttcatacgcgatggagaaattttctcggaaatacataaaggaagaacgaaacaagcctttttccaagaaatcctggacgtacttgcgatgctaggaggagaatatcatgaactttcgccagctcgcgcttaataacgtaaaaggaaattggcgtaactataaagcgtttcttataagtagttgtttatcgattgtcgtatttttcatgtatgcttcttttatttatcatccagatgtcgtaagcggtaatattagtatgagaaagatgatcacaaaaggattagaatcgatgaattatattgtggtcatcttctcggcactctttattttatatgcaaattcaacgtttttacgagcaagaaaaaaagagtttggtctactaacattaataggcggaacgaaatcgcagctcggccgaatgattatattagagcaactgatgttaggtagtattgcaattgtagttggtattggggttgggatgctttgttcaaaattatttttccaagcgttaagcgtattattaaaaatagataagacacttccacttgtttggaatagtaaagcagttcttattacagctggtgtatactttattctatttttaatcctatcattgtttagtgtttggacagtaggacgcttgcaaattattgatttattaagagaggcaagaaagcaaaaagtagagccgtttgcatttacatggttatgtgtagttggtataggatgtattattgttgcatatgtacttagcttccaagtaacgtttctgaatttcctcatcctttttttaccggtggtgggactgacaattggcggaacgtatttactatttacacaaggtagtacagttgtattaaaagcattacaaaaaagaaagcaatctttttatacgtacccaaatatgttcgtccttagcaaccttatttataaaatgaaagataatgctcgttttctatttgtaatttctatcattacggcggtagtatcttcagcggtgggtacactgtacgtatattttgaaaatatgagtgcgaaaacggtagaacttacaccacatgctatttcatatgaggaaaaggggttaaatacgcataaccttattaatgaagaaaaggtacaggagcttgtgaagagacacgggtttgaagatgcgcgaaaagtaacatacgttaaactaccggcaacacagaaaataacgttgtttaatagtgaacatgaagtaccgatgacgattatttcagaaaaagaatataatgcagaagtgcgcaaacaaaagagagagcaacctacagaagttcataatgcaccaggtagtgcaacgatggttatggttgatatgtcaaatgaactgatgaagatagatcgtacgaaaccgtatgaatttacaattaacggacaaaagcagtctgttcaattaaataatccaacgcagtattctgtttttaatgatagtgaatatctcattgtaaatgatcaagattttgagaaatatgcaaaactcgtaccagatgaagaaaagtcgaaatattacggttattatattgaggattggaaaagtacagaaaatcttgtattagatttgaaaaatgaaattgtaccagaaaagcaaggggaattgagaaattcagtgtttgcgtataaggatataagagaaggtggagcaattacaatgttcatcggtttcttcgtagcggtactgttcttcttcttcgcttgtagtatgacatactttaaatggtttaacgataaagaacaagatcgtattcaatttaaatcgttaaagagaattggtatgacagataaagaaattcgcaaaattgcgattcgacaaatgggagttatcttctttatcccaattttaatcggttccattcatagtggatttgctcttcatacgttagggaaaatgctttatattaatttatggaaatcaggtgcgcttgtaattggagcatacattttagcttctgccatttactttatgatcgcgcaaagaggatatttaaaacacgtaaaaagctaggggaacctctagctttttgcctatgtagtaagttacaggaggacgatagatgaacattcggcaactagcgctgcaaaatataaaaggaaattggcgtaattataaagtgtttttcttaagtagttgttttgcaatatttgcttcttacgcatatatgtctgtcattgtgcatccatatatgcaagagacgatgtggtatcaaaacgtacgctggggacttatcatatgtaatgttataatcatttcttttttcgtcatatttattttgtactctacttctattttcatagaagcacgtaagaaagaattagggttatatatgttaatgggagcaacgaagtctaacgtaataggagtgattatgaccgagcaaattttaatcggggtcttcgcgaatattttcggtattgggcttggtatgatatttttaaagctcttttttatggtatttagtatgttactggggcttccgaaagaactccctgtcatatttgacgtaagggcgattggtgtaacatttattacatatatggtcgtttttattttgttatcttttataagtgctttacgtatatggaatataaaaatcattcggttattgaaagaatttcgaacagataaaaaagagaagaaaacatcaaagtggctctgtttattcggttttgcttgtttagtgggcgggtatgcattggcgctacaagtgacgatggctacgatagcgatatactttttccctgtgtctatacttgtcttttttggaacgtacttttcttttacacatggagctacccaagtgttagaaataataaagagaaataaaaagattatgtatacatatccttatttatttatagtgaatcaattgtcacatcgaatgaaggaaaatggtcgctttttctttctgatgtctatggcaacgacgtttgtagttacagcaacaggtacggtgttcttatatttttctagcatgcaagatatgtggcgaactggaggggtacactcgttttcgtacatagaaaaaggtatttctactcatgaagtctttgaggaaggtgcggttgaaaaattactgcatcaatatgggtatgacgattttcaatatatgagttttgttggagtgtatgcatcctttcagtctagtaaaggagaaacaacaatagtaccgcttataaaagaaagtgaatataaccaagaagcaaggaaacaaaaacaaaaaatgtatcgtcctaaaaaaggtacagtgacacttgtttattataataaatacaataattcgaatgtatataatcaaaaagagattgaattgcaagtaatgaatcaaccatatcaattcgtatttaacggtcagaaagaaggggttcaatttaaccatcacccttcgtacattaatggtctgttcttcgttatgaatgatgaagattttgatagtatagcaaatcaggttcctgattctgaaaaaatgatatatagaggctacacattaccaaatatcgaaaagacgaagaaattaaatgaagatttacggaaacatatgaaacaagataataataatgcatttcgaagcaatatggagttgtatgtaaatgtgaaagaaggcggcgatattactctatttgtaggctcatttattagtatattattctttcttacttcatgtagtatcgtttattttaaatggttccataatattgcatcggaccgaaagcagtatggtgcactctctaaacttggaatgacgaaggaagaagtatggaaaatttctcgttggcaattatgtatgctattttttgcgccaattatagtagggagtatgcatagtgcagttgcgttatatacgtttcataatacgctttttatggatggatcattaagaaaagtaggtttgttcattctgttttatatcgcagcatgtatcatttatttcttcttcgctcaaagagaatataagaaacatttagactagcgaacgctagtctttttttaatattcgaaatttacatagaagaatataaaaaagtatggtataacagtaagaaaacgaaaaagaggggaaaagacgatgattcgagtaggatatttaggaccagaagcaacatttacaaatatggcggtgagtcgtttttttccggaagcagagcatgtaccatatcgaacgattccagattgtatagatgcagctgcaaatgaaaatgtagacttcgcagttgtaccgttagaaaatgcaatagaaggttcagtgaatataacggttgattaccttgtacatgagcagccgctttccattgtaggagaaattacagtaccaattcagcagcatttacttgtacatccgcagtatgcagaagtgtgggatgaagtatatgcagtgcattctcatccgcatgccattgcacagtgccataaatttttaaatgaagaattaaaaggagtaactgttcgagatatgacatctacaagtgctgctgcgcaatatgtgaaagaacatcctgaagagaaaattgccgctattgcaaatgaagcggctgcagaaaaatacggattaacaattgtgagacgtagtattcatacgcataaaaataatcacacacgtttcttggtactccataagaaaaagaaagcagtactcccgaataacggagagaatcgcggagagaaaacgacgcttatgataacgttacctgcagattatgcaggtgccctatatcaagtgttatcagctttcgcatggagaaaattaaacttatcaaaaatcgaatcgcgtccgatgaaaacaggtcttggaaattactttttcttaattgatgttgataaagcatacgatgacgtattattgccaggcgtaacgatggaacttgaagcactcggtttttctgttactgtgctggggagttattcttcttattggttgtaagatgtagatggaatgttggtatttgtctaatcgtcaatatcatttcattgcctaatatattttttaatagattaataaaatcccacctgcagaaggtgggattctttattttaacttcgcaagacgatcttctaactgaccacgccaaatatcagctagttctggaacagcaagaattttttcaatgccatctttatcttttctattatgaaaataaatttcgttagagaacaagacagaaacattgctcggttgacgttctagtaatgtaattttagaatctttacgtacagtaccttcttgaagaacgcggcataggtagcctgtaaatccagttgctacaatgcgtggcagtatgccagggatgccaagacgttttgaaattgtgctacaaggtactcttgcttgtgtcacttgaatgattgtttcacctagttgatatgtatctccgatgcaaacatcacgctctaacatatttgttacggtaatgttttcgccaaatgtggaagctggaagcgtagtttgaaattcctcttcccatagtgcgtaatgctcgtgtgggtacacacaaacagcacgatcaggaccgccgtgatgttttaaatccgctacgtcatcaccaagaaatccgtcttttgagagaaaggcctcttctgtaggatctttacatatacctgttatcatttctttatcttcgccatatttcatttgtttcggtttgccaatgctaaagtgaacgagttcaattcccatgtttgatctcctttacgattgattacaatattatagcattaaaaaagcacagaggatgataaaaaactctgtgctttacattaataaacgagaaatcctgctttatctaacgcctcacaagcagcatctaacttttctttagaatctgcttcaattgtatgtaagtgaataccgtctgttagttgcgatagataggaagcatttgtgttttcgattttttgtaaatattgctctacatcaaatcgattacttaccataattgatgctgttaagtcgccgtatacaggatgctcaacttttacatctttaattgtaacgccatggtcaacaagcattgtaagttcttgacgtacttctgctggtttgtgctggcatacgattacgcgttcaaaagcttgttgtttctcttgtggttttaaatataaatagccttgggcagtcgcaataattggttcgtttcgtgctttaagcaaggaaatatcttgcacgataacttgtctacttacgtttgtcttcttcgatagttcattcccagataacggctcatttgcagcgagaagccactgaaggataagctgtcgtctttcttcgcctaaaatctttttttgttcattttgtttcattatgatttaacacctctataaaattgatttccaattgtgtgtagtgcatgaatagtagtatcaatttgatctttcgttgtttgttgtccgaaagagaagcggacatattgtttggcctcttcatacgtttttccaattgcaagcatagttttcgaaggttcttgtttaccgacttggcaagcacttccggtggaaatggcgataccatggcgattacattctaacatagtatattgaccttctattccttttattgtaaccccaacaatatgtggtaaacaagaagtagaatgaccttctacttcaatttctagcggaagtgtttgtatttgccctaaaaagtaggagcgtaactctttaaaacgtaaactttcttcccattgagtttttaatatattttcagcagctgttaaaaaagatgcgatgccgggaacgttcactgtacctgggcgaaatcccttttcgtgagaagttcctggaaatacttgctcccagcgcgattgcggatttatgtagcaagcgccgacaccttttggtccgtatattttatgtgctgaaacagaaagactatcaatccccatctcaaaaacatggataggcagtttaccaaacgtttgcacacaatccgtatgaaataaaacattatatttttttaaaagtgccccaatttctgtaatgttttgaacggttccgatttcagagtttccatgctgtatacttgctagcacagtatcttctgtaatagctgcctctaaatctactaaacaaatgagtccatttttatcaacaggaatttcagtgatcgtatagccttttgattttagagattgaaaataacttcgaatggatgcatgttccataggtgtcgtaataatatgcttcttattttgggcatttagaagtgattggatcgcaagatagttcgattccgatccaccacttgtgaaaaatactccttgttcttttcctccaatcatttccgcaaatgtttttcggcaaacttgtaataaagaagaagccgttcctccaatatcatgtaagctttgttcatttccgaagtattgcgacgctgctttcatatatgtttgtaacgcttcctcgctcataggtgtagtagctgcatagtcaagatatatcatcatgtaagttcctctctctagtaagagttacatttcttttactttttaaatggtagtgaaaataagaattataaaaaaactcttgtcattattttaaaattatgtaaatataggtgtcaagacagttgaaaagtgtaaagtaggaggcaacaattatgccaagcgcagatgtcttaattattggaagtggcgttgcggcacttcgtgttgcaaaagagatttgtcacgaaaagaatgtgattattatcacaaaggagacgaaacgtaataataatacacatttagctcaaggtggaattgccgcagcggtagctacatatgacaatcctaatgatcattttgaagatacattagtagcagggtgtcattataacaatgaagaagtggtccgttatttagtcgaggaaggaccgaaagaaattaataaccttattgagaatggaatgaaatttgatggagatgaaacaggtcctcatcttggaaaagaaggagcgcatcgaaaacgtcgtattttacatgcaggtggcgatgcaacaggaaagaatttattagagcatcttattcaagaagtagctccatacgttacggtagtggaacaggaaatggtgctcgattttattatagaaaaagataaatgtgttggggctttaactcgcaacaataaaggagaattgaaacgttacaatgcagattgtacggtgttagcttcaggcggtattggcggtttatacgcctttacttctaatgatgagacgattacaggcgatggacttgcaatggtgtaccgtgcaggcggagagcttgtagatttagagtttatacaatttcatccgacgatgttatacgcgggtgggcgttgttccggcctcgtgtccgaagctgttcgcggagaaggagctgtccttataaatggaaaagggcagcgttttatgatggatatacattccgaacaggatctagcacctcgtgatgtagtcgcacgggctattcatgaacagctacttgcgggtgaaaaagtgtacttaaacatcgaaatgattcaaaactttgaacaacgctttccgaccgtgtcatcgatatgtaaaacaaatggagtcgatataaataaaaaacttattccagtcgtgcctggtactcattttcacatgggcggcgtgaaaacgaactgtgatggagagacgtctattccgaacttatacgcagtcggtgaagtagcttgtaacggagttcatggtgcaaatagattagctagtaattcattattagaaggtcttgtgtttggaaaaagaaccggacgacacattttatctagagagacaaaagaaaaggtgaacatgctagctgaaaaggaaccaaagttcatcgttctgaatcatttaccgacgaaagaagaaatacaaaaatgcatgatgaaatatgttgggattgtgcgaacagagcaaagtttatcttatgcgaagagatggtttagtaagtatggtgttcgaaatatgatattacaacatgatgttcttacgaatgaagagataacacttattaatatgttaacggcttgtgagcttatagttgtgtcagccttgcaaagagaagaaagtattggcgggcattaccggagtgattatccagatagaaatataggaaagaaagagattgttcgagtaaagagaaaattacaacttgtgtgatgaggggaagagaggctttatgaacacgataaaagttaaagaagcattaaaccgattttttttagaagatataggagaaagagatgtaacatctcagcttatttttccagataacttgctttcgaaaggaacgtttcttgcgaaggatacaggggtctttgcaggatgtttagtaattgaatcaggatttaaattaattgatgagagaattgaaatagagcttcataaaaaagatggggatcttgtagaaaaaggagaaattattgcaacagtgcaaggtccaatcgcatcgttattaacagcagagcgcgttatattaaatgttattcagcgtatgagcggaatagcgacgatgacgcgtaaagcggttcttgctttagatagcagtcatactcgcatttgtgatacacgaaaaacgatgccaggactacgtatgtttgataagtatggagtcgtgtgcggcggtggatttaatcatcgcttcggtttatatgatggtgtcatgattaaagacaatcatattgcgtttgctggttctattacaaaagctgttacatcagtgaaagaaaagttaggacatatggtgaaagtagaagtagaaacagaaactgaggaacaggtgagagaggctgttgctgctggtgcggatattattatgttcgataatcgtacgccagatgaaatccgggagttttcaaaaattgtaccaagcgctatcgttacagaagcttcagggggcattacaattaaagatttatcaaaatacggaaaaacaggggtagattatatttcacttggagcgttaacacattcagtgaaagcacttgatattagtttcaatattgaagagtaaggaaagtggcttagagggggagaaacgtatatgagtattttagaacaagtacagtcaattgaaacgatgttaccagagcgttattacacgatgtcaacggaagatatggaaaagcgtgttcgtgaaattaaagagaaaatggggaaaatgttattcattccagggcatcattatcaaaaagatgaagtggtacaattttcagatgcagcaggggattcacttcagcttgcgcaagttgcagcgagcaataaagatgcaaaatatattgtgttttgcggggtgcactttatggcggaaacagcagatatgttaactacagatgatcaagttgtcatcttaccagatatgcgtgcaggttgttcgatggcggatatggcagatattgaacaaacagaaagagcatggaaagagctcacgaaattatttggagatacgatgattccgttaacatatgtgaactctacagctgcaattaaagcgttttgtggtcgtaacggaggagcaacagtaacttcttctaatgcaaagcaaatggtatcttgggcgtttactcaaaaagaacgtctcgtctttttaccagaccaacatttagggagaaatacagcgcacaatctaggtatcccgttagataaaatggcagtatgggacccacacacagattcattagagtacgatggggatatagaagaaattcaagtgattttatggaaaggacattgttctgttcatcaaaattttacagtgaagaatattgagagtgtacgaaaaaatcattctaatatgaatattattgtacatccagaatgttgctatgaagttgtagctgcttcagattatgcaggctcaacgaaatatattattgatatgattgaatcagcgccatctagtagcaaatgggcgattggtacagaaatgaatttagtaaatcgaattattaagcaacatccagataaagaaattgtttcgcttaatccatttatgtgtccgtgcttaacgatgaatcgaattgatctgcctcacttattatggacacttgaaacgatagaaagaggagaagaaattaacgttattagcgtagacaaacaagtaacggcagaagcagttcttgcattaaatcgtatgttagagcgtgtgtaaagcaacggtattcccgttgctttttttcatacatataatcataacgagaacgaaatgggcatacattgttttgaagaaatcattgtggttctttatgcttattccacttcgaatgatattgaaaatcgaagaagtgataaaagtgaaaagaagttaatgttatttagaaagagttacttcaagagatttgttacttatagataagttatacaggagggggaaaatttgaaaattcatatcgtgcaaaaaggggataccctttggaaaattgcgaaaaagtacggagtggattttgacacgttgaaaaaaacaaatacacaacttagtaatccagatttaatcatgccaggtatgaaaattaaagtgccatcaaagagtgttcacatgaaacaacaggctggagcaggttcagcgcctccaaagcaatacgtaaaagaagtgcagcaaaaagaatttgcagcaacaccaactccgcttggaatagaagatgaggaagaagttacgtatcaatcagcaccaattacacagcagccagctatgcaacaaacacaaaaagaagtgcaagtaaaaccgcagaaagagctgcaagtaaagccacaaaaagaagtacaggtgaaaccacagaaggagatgcaggtaaagccgcaaaaagaagtacaggtgaaaccgcaaaaagaggtgcaaaaagaacagccaattcaaaaagaaaaaccgtctgttattcaaaaaccacctgtgatagaaaaacaaaaaccggcggaaaaagaaaacacgaagttttcggtaaatgtattaccgcagccgccacaaccaccaataaaaccgaaaaaagaatataaaatttcagatgtaataaaaaaaggaagcgagttaattgctcctcaaattagtaaaatgaaacctaacaatatcatttctccgcaaacgaaaaaaaataatataatatcgccgcaagtgaaaaaagaaaatgtagggaatatagtgtcgccgcaagtgaaaaaagaaaatgtagggaatatagtgtcgccgcaagtgaagaaagagaatgtagggaatatagtgtcaccacaagtgaaaaaagaaaatgtaggaaatatagtgtcgccgcaagtgaaaaaagaaaatgtaggaaatatagtgtcgccgcaagtgaaaaaagaaaatgtagggaatatagtgtcaccacaagtgaagaaagagaatgtaggaaatatagtgtcaccacaagtgaagaaagagaatgtaggaaatatagtatcgccaaatgtatcgaaagaaaatgtagttattccacaagtcataccgccaaatattcaaatgccaaatataatgccaatcatggataacaaccaaccaccgaatataatgccaattatggataacaatcaaatgccgaatatgatgccaattatggataacaatcaaccaccgaatatgatgccaatcatggataacaatcaaatgccgaatatgatgccaattatggataacaatcaaatgccgaatataatgccaattatggataataaccaaatgccgaatatgatgccaatcatggataacaatcaaatgccgaatatgatgccaattatggataacaatcaaatgccgaatataatgccaattatggataataaccaaatgccgaatatgatgccaatcatggataacaatcaaatgccgaatatgatgccaattatggataacaatcaaatgccgaatatgatgccaatcatggataacaatcaaatgccgaatataatgccaattatggataacaatcaaatgccgaatatgatgccgagtatggataacaatcaaccaccaaatatgatgccctatcaaatgcccatgatgccgccgaatccgtattatcaacaaccaaatccatatcaaatgccatatcagcaaggagcgccgtttggaccgcaacatacgtctatgccaaacccgaatatgatgccaatggataataacatgccgccgcttgtgcagggtgaggaagattgtggatgcggaggagaaagtagactatatagtccacaaccaggcggtccgcaatatgcgaatcctttatattatcaaccaactcagtctgcatatgcaccacagccaggaacgatgtattatcaaccagatccaccaaatgtatttggagagcccgtttcagaagaagaggacgaagaagaagtttaaaaaggcgggagtattcccgccttttttgcattcctgttaattaagaaaaggcagtttttttatgaagtgctagaaaattcccagtgaaatattaacagtgtaaaaaccttctctgttactcatcataagagggagcttttcagtagagaagctcattctaacagagggggtttttgtattgaatacgaaagtaaaagtgattgctgcttctttgttagttactagtgcattagctgcatgtggtacaccaaaaaacaatgcaatggatggacgtaactacaattacgagcgtacatcttataatgatacacaccagtatcgtgataatgtgacgcgtaatgatcgttatacagattatgtaacatatagaaatggtcgtaacgatacaggatacaattattaccgtgatgtaaattacaatggacaaattgctaatccgcatccaactcgtaatattacaatgaacaattcatacattaacaatgatggtaaaacagctgaaagaataacaaatcgtgtgaaacgtatgaataacgtagaccgtgtgtctacagttgtatatggaaacgatgtagcgattgcggtaaaaccacgtaacacagtgacaaatgaaacggcgatggcgaacgaaattcgtcaagctgttgcaaatgaagttggaaacagaaacgtatatgtttctgtaagaaatgatatgtttactcgtgtcgatgcaatgagtacgcgtctacgtaacggtacagttacaaacgattttaatcgtgatataggaaatatgttcagagacattcgttacggtttaactggtacagtgcgatagcaaaacaaaagaggaagggggagcccttcctctttattcattttcgtcttgtaaacgacgttttttaataaaataactaacggaataagaacctaaaaagcatatgaagagaataccacctgttaaaatagcttcaaatagggggctttctggactgaaaatgatataaataatagccataacgattcctacaataagagagcgtaaaacaattttgtaataaggagttaattttatctccttttcactttcttctacatcaattgaaacacttaactgtaaataactaaggattatactcgtaagaataaatactagccataatggagatttcgtaatttgatctattccttcagtgaatccgatatagcctaaaataccgattataccaagtgattgaaaaagaaaagcaatacgtacgttttttaacgtttgcagaatgagacgttcatcctttatttttttcacactacccatctcctgtttattatgatttcgctgttacattaattgtaacatatacattacatttatcaatttataatttacatataatttgtttagatgaaagaggaaataaaatatttttataaacatgttgcacttatactttattaatgttatattagcaaagcgatgagctaatttacgtaagacgagagatatgcttaagtgctaaacacgcgaatgtggtcgcctggtctctcgccgtaaacgcatcaagacgcctgctttgcaggcgtctttcattttatataaaagtaaatgatacatgcagatgaggtgaatccttatctgcattttttatattttcgaaagaaatataatatggataaaacccccatttccggaaaaactactaatgaaagtatgatcttgcctaaaagaggtgaacggaaatgaaatggatactgattgcgatgcaagctttcgttataatgttttgtttcgtttatgaaacgaatgtgaaggcggaagggccagtaccagaagtgacgaaaaaagaacctgaggttacaattttattagagcgtatgtatgttgatggcgaagtaagcgaagaaatacttacagaaaaagtgacggatttagaaaagtttttacagcagtataaagaatggcagctcgttgatcgtgatgatgtacaaattgtattgcaaaagaaagttgatgatatttctccgttattgaaaacgagcgggtattttggtgtttcagaggaagggatattacaaattttcaaaggtgtgccaaaaaatgataatgcgatccattctttctttcaaattgatatgaaaaagcttgagagctatgaacgtgcgaaattgaaacgtggcattcgtattaaatcaaaagaaggttttgtgaagacgattgaaaaaatgaagcaatacgcagttcaaagtaagaaaaaaagcagctcatggtgagctgctttttttcttatttatttttagctaaaatttcttttgcgatttcatcaattagcatatcttttccgattggattgaatgctttcgtattgaagacttcatttaatacttcatatacgtgattatttttaactgctttattgtctttccaaacggcactgtttttgtagtcttcgtaaactttatcagcttcgccgccgaagtttacaataaacatttggtcaggctggaatgcaactagaccttctagtgatacttgcgccatcgtttgttttaaatccgtaccttttgttgctggaagttttaagtcattaaagatgatgtcaccgtatccgaagctaccgtatacacggaagttttgtggtgtaactgcaacgaacataaagttctcatcttttgttttctctttaatttttttagataaagagtctgctttcttatcgtagtctgcaatccatttgtctgctttcttctcttcgtcaaatagcttacctacttctttaaacttaccacgccagtcttctaagtttgtttctagaacaactgtaggtgcaaccttttctagttgatcataaatttttaattgccggttgtttaaaataattaagtctggttttaaagcagtaacagcttctaaatcaactttaggtgcccagtaccaacctactgcttttactccatctaacttgtctgttaagtgattttggattttatctttatatgtatttgctgtaccaacaggtttatgtccaagaagtaatagttcttctgttgatccagataagtcaacaattctctttggatttactggaattgtagcttcacctttagcatgttttacaacttttgttttcggttgttcttttgctttcgattcttctttttgagaagaacagccaacgatagaaagaacaacaagcataatagtaaataaaataaatagcttacgtttcatcctgatgtaacccctttaattagtattgataatcattatcgacttctgtatattaaggtgctttaacctttctgtcaatggaaaataacagaagtttcaagtggagaacatttgttggggcagtctcgcttttctatcattaaatatgttaaaatggaatacatgatttaagagggagagatcgtattttgtttgaatatgttacaggttacgtggagtatgtagggccggaatatgtcgtaattgatcataatggaattggttatcaaattttcacaccaaatccgtatgtatttcaaagaagtaagcaagaaatccgtgtctatacatatcattatgtgagagaagatattatggcactttacggttttaaaacacgtgaagagcgtttattatttacaaagttgttaggcgtgtctggcattgggccaaaaggcgctcttgcaattttagcttctggtcaaacaggacaggtcgttcaagcgattgagcatgaagatgagaagtttttagtgaaattcccaggcgtcggaaagaaaacagcacgccaaatgattttagatttaaaaggaaaactagcagatgtcgtaccagatgcatttgttgatttattctcagacacagaacgttttgatgagaataaaggttcatcagctgagcttgatgaggcactggaagctctgcgcgcacttggatacgcagaacgcgaagtttctcgtgttgtaccagagttattaaaagaagcattaacgacggatcagtatattaaaaaggcacttagtcttttactaaatggtaagaggtgagtataatggacgaacgtctcctttcaggggaatctgcatatgaagatgcggatttagaatattcattacggccacagacgctccgtcagtatattggccaagataaagcgaaacataatttagaagtatttattgaagcggcgaaaatgcgtgaagaaacgttagatcacgtgcttttatatggaccaccaggtcttggtaaaacgacgcttgcgaatattattgccaatgagatgggcgttaatgttagaacaacttcaggtcccgcaattgaaagaccaggagatttagctgctgtattaacagcgcttcagccaggtgatgtattatttattgatgaaattcatcgtttgcatagatcaattgaagaagtattgtatcctgcgatggaagacttttgccttgatattgtaattggaaaagggccttcagcacgttctgtacgcctagatttaccgccatttacattagttggagcaacgacacgtgctggagcattatcggcaccgcttcgtgaccgcttcggtgtactttcaaggttagagtactacacagtagatcagctttctgcgattgttgaacgtacagcagaagtatttgaagttgaaatcgattcgttagctgcattagaaattgcaagacgtgctcgtggtacacctcgtattgcgaatcgtcttttaagacgtgtacgtgatttcgcacaagttcgtggtaatggaacggttacgatggaaattacacaaatggcattagagctactgcaagtagataaattaggtctagatcatattgatcataaattactgcttggtattattgagaaattccgtggcggtccagttggattagaaacggtttcagcaacaattggagaagaatctcatacgattgaagatgtgtatgagccgtatttattacaaattggctttttacaacgaacgccgaggggccgaattgtaacgccgcttgcgtatgaacatttcgaaatggagataccaaaagtatgacggagatgccaaagctgcttattacagccgggatcttactcatcgttgttggattagcttggaagttcattggaaggcttccaggcgatatttttgtgaaaaaaggaaacgttaccttttattttcctatcattacatgtattgtgttaagtattgtattatcttttattatgtatataataaatcgatttaaataagaaataggtggatatagctatggatataaatctgtttgattttcatttaccagaagaacttattgcacaagtcccgttagaagagcgtgaaacatcaagattaatggtgttagaccgtgaaacaggtgatattgagcataaacattttacggacattctttcttacttacatgagggggattgcttagttttaaatgaaacgaaagttatgcctgctcgtttgcacggtgtgaaagaagatacaggcgcgcacattgaagtacttcttttaaaacaagaagaaggtgataagtgggaaacgcttgtaaagccagcgaaacgtgtaaaagaaggaactgttatctcttttggcgaagggaaattaaaagcaacttgcacaggaactgcagatcaaggtggacgtcagcttgaattttcatatgacggcatcttctatgaaattttagatgaacttggggaaatgccacttcctccatatattaaagagacgctagaagatcgcgatcgctatcaaacagtatatgcgaaagaaatcggttcagcagcagcgccgactgcgggacttcactttacagaagagttacttgagaagttaaagcaaaaaggcgttcagttagcattcattacacttcacgtaggacttggaacatttagaccagtttctgcagacacgattgaagaacaccatatgcacgcagaatattatcatatgtctgaagagacagcggcattattaaatcgtgtgaaagagaatggtggacgtattattactgtaggtacgacatcaactcgtacgttagaaacaattgcaacagatcatgaaggtaagctttgcgccgcttctggatggacagatattttcatgtatccgggatatgaatttaaagcaattgatggtttaattacaaacttccatttaccgaaatcaacattaattatgcttgtaagtgcatttgcaaatagagataatgtacttcatgcttataatgaagcagtaaaagaaaaatatcgtttctttagcttcggtgatgcaatgtttgttgcatctcacgctaaaatgagaaacaaataaaaggagtaagttatgacagcaattcgttatgaatttattaagacatgtaaacaaacgggtgcccgtttaggtcgtgtgcatacgccgcacggttcatttgatacaccaacatttatgccagttggtacacttgcaacagttaagacaatgtcaccagaagaattaaaagcaatggattctggcattattttaagtaatacgtatcatttatggctacgtccaggtcatgaaattattcgtgaagcaggcggcttgcataaatttatgaactgggatcgtgcaatcttaacagactctggtggtttccaagtattcagtttaagtgacttccgtcgtattgaagaggaaggcgttcacttccgcaatcacttaaatggagataaattattcttatcaccagaaaaagcgatggaaatccaaaatgcattaggttcagatattatgatggcatttgatgagtgtccaccattcccagctacttttgaatatatgaagaaatctgtagagcgtacgagccgctgggcagaacgttgcttaaaagcgcatgaacgtccgcaagatcaaggtttattcggtattgtacaggggggagagtacgaagagcttcgtcgtcaaagtgcgaaagatcttgtttcaatggacttccctggttacgctgtaggtggtttatctgtaggcgaaccgaaagatattatgaaccgtgtacttgagtttacaacaccacttcttccagataataagcctcgttacttaatgggtgtaggttctcctgactcgttaatcgatggcgcaattcgtggtattgatatgtttgactgcgtacttccaactcgtatcgctcgaaatggtacatgtatgacaagtgaaggtcgcctcgttgtaaaaaatgcgaaattcgcaagagacttcggtccgcttgatccaaactgtgattgctacacatgtaaaaactactctcgtgcgtacattcgtcacttaatgaaatgtgatgaaacgttcggaattcgtttaacgtcttatcacaaccttcattttctgttaaacttaatggagcaggtgagacaagctattcgtgaagaccgtcttggcgatttccgcgaagagttctttgaacagtatggctttaataaaccgaatgctaaaaacttctaatacataatttaaaaggaggaacaaaagatgaatgcaggtatgatgaatatcgttatgatcgttgcgatgtttgcgattttctatttcttattaattcgcccgcaacaaaaacgtcaaaaagcagttgctcaaatgcaaagtgagttagcaaaaggtgatgctatcgtaacaatcggtggtttacacggtacaatcgaatcagtagatgagacgaaaattgttattaaatctggtggttcacacttaacgttcgatcgcaatgcgattcgtgaagttgtgaaaaactaatttggaaggccctgcatgaaatatgcagggccttttttagttactttgctttgacatatttacaccgaaaataccaccgagtgtactcgcccccattaatgctaattgataaagtaattgtgagttcgataaagtttgagaaaagcctaaatagttaactagaaaaacgagtatagtgaacgtgagacctgttgtgagacctactagccaaccttttccttgagcctttttgccggcagtaaatccagacataagcatagataaaagagcgagtataaaaatagtaacggttaatgtcccttcgtttatattcgtaaactttaataaaagagccataatcatactagtaatagatgcgagaattagtagtgtaacaataccgaagccaattgcagttgataattttttcgttccatccatttatgcattccccctttttaatacaagcatattttccttttgtctaagttagactagtttcttttttataggggagtctatacgtaaaaaaggagatgtagaaatggaatggatatcaataattggacggacaatgcttttgtatatcatcatcttaattatttttcgtcttatgggtaaacgtgagataggagagctaagtgtattagatttagtcgtatttattatgcttggagaaatggctgtagtggcaattgaaaataccgataaatcactttggcatcaattagttccgatgacttttcttatgtgcatccaaattattttgtcagtcatttccctaaagtatcaacgctttcggcatttaatagaaggtgagccggctattcttgtaaacgcgggaaagattgatgaaaagaagatgagaaagcaacgttataatatagatgatttaatgatgcaattaagggaacaaggagttggagatattcgggatgtagaatatgctattttggaaccgtctgggaagttatctgtctttcaaaaacaaaaaaataaacaagatacattgcagtttacgcttcctcttattattgatggagaaattcaatctagtcatttacaaatgattgaacatacagatgcatggcttattgagaaattaaaaaacttaggttataacgatgtaacacaaattttatactgtagttttcaaaacggaaaattttttgttgatgtaaaagaaaattagagacttattctttgaaagagtaagaatgattagtgtaactaataatcagtggagattaccccactgattaaagtttcaccttatttcaaaaatgaaagtttacgaatgatagggagacgacttaactcttcttttcgaatgagtttgaaagtgaagagaagtacgatataaacaattgttgttaaagtgatttcccataatgtttgtatgccaagggcatgagagaaaataatatatttatgaagataaaaaccgaaggcgcctgcgataccgatggcaagtccgccgaaaatatagtcttttgcgtaaatggtaaatgtaatcttttttaaaacagtagcgtagtgaagaaatgttactgttacaatatttgctgcaatagcgagagcaacccccatcatttgaaattctggcctggatgctagtacaaaaataacgattaatttcacgatggctccaataaatgtattcatcattgcagctcttgctaagtttaaagcttgcaaaacagaggtaagtggactttggaaataatgaaataaaaagcaaggcgcaagaagttgaatgaatgctgttgcgctgtctgatccatacataagagttaaaacaggagaagcgaatacgtataatataacgacagaccatccgccggtaattaatgaaattcgaagtgcttgttgtaaacggtgctccactaatttatgttgtctttttgccattgcttcactaatagaagggacgagcgctgtagagagagcgtatgtaataaaggcgggtagtgatagaagcgggaatgcataaccgtttaatataccgtattgctgggttgcaacagaagcagcgacaccagcgattgctaagctttgcataacgacaataggttcaaaaaaatatgaaacggagccgattaaacgacttcctgtagttggaagggcaatatccatcagagaataaaatgtccctttgctttcctttacagtagtgaaaaatccagagcgtattgataaatgtttttctcgctgaaataacgtgagtaaaaataataacgatgcaacttcaccgagaacagctgataacatagcgccggctgcagcgtattctatgccgtaaggtaaaaataattgaatgcatatagcgataatggtaatgcggacgacttgttctagaacttgcgcataagcgctaggtttcatgttttgtttcccttgaaaataaccacgcaaaacagaagaaacagcaataacaggaacaacgggcaaaatggccattaatggatagtacgttctttcgtcggttaataatgtttttgctaaaataggtgtgaggaacataattccgattgttaaaatgatactaataacggatgtaacagctagtgatacggttaatatttttttaactctttgtttatcgttcacagcttccgcttctgctacaaattttgcgattgcgacaggaagaccaatttgtgtcaatgtaattgctaaaatgaatgtaggaacggccatcatataaagaccaacgccttcttctcccaaaatacgtgccattactatgcggttgataaagccgagtatttttgtaataaagccggctatcattaaaataaatgcgccttttaaaaagctttgtctcgtcatgttcttctcctaccttctcaaaatcaatggaatgatttacaataatttatatgcacgtacgagacaagaatgacaagcatttaagagagtgaaatatgatagtgctcttgaaagtagttattgctgtccattagagcgggaataaaagcgacttttcgtgcgaaataagaaggagatgttatagatgttagatagagaggctttggtagaatcataccgcggacagttacaagtcgttttagaaagtaaagtagaagagtttcaaatgttcggctacgacagagtgacagatgatgacatttggaagtttcttaaagtgaaaaagtggaagaagatagacagcgatgttagattgtatgaattagttaatgacgtattaacagtaagtgctaatgaatatatgacatatttaactgttgaagcatatcaagcgccactttggtcatttgatgaatatgaaaataaataaccgactgcaattggtttgttcttccttttgcagtataatgataggtattgataatcaggaaataattatgtctaagatcatatataaaggaggtagtgaagagagaaaacaaataatgaaagtgcaggtatcgtgaaaacgtaccggcacagctagtgatgagctagcaaaattatagaaaggaagtctactaactagacgtatacacacgtgtaaaagtgaatcgtaagagatttatttaaagtgttagtagcggaaagagggtacatatggcaaagcgtggtacgagaattgccgcctttttcctcatcgttttattaatcggtggagtaattggtgcggcaggaaaagacatagcaaaaggaattagtctaggactagaccttcgcggtggttttgaaattctgtatgaagtaaaaccagccaaaaaaggggacaaaatcgatcgagacgtacttgtaagtacagtaggtgctcttgagaatcgtgtcaatgttctcggtgtaagtgagccgaacattcaaatcgaagggcaagatcgaattcgtgtacagcttgctggtgtacaagatcagcaaaaagcacgtgaaatgttatcaacacaagcgaaattaacattccgtgatgtagatgataatcttcttatggacggaacggatttaaaaggcggcggagcgaagcaaacatttgatgagcaaggccgtgcgagcgtaggtcttacactaaagagcgctgaaaaattccgtgaagtaactgaaaaaatttcaaaaatgccaccaccaacgaatttaatggtaatttggcttgattttgaagaaggaaaagattcgtacaaagcagaatctgcaaaaccgaatccgaagttcttatcagcagcaacagtaaaccaagtatttaaccaagctgaagtatctatcgtaggtggaaacttcacagttgaaagtgcgaaacaactttcatctttattaaatgcaggtgcacttcctgttgatttaaaagaaatgtattcaacatctgttggagcgaagtttggtcaacaagcgttagagcaaacgattttcgctagtgcgattggtatcgctcttattttcttatttatgcttgtattctaccgtttaccaggacttgtagcggttattatgttaggtttatacgttttcgttacattacttgtctttaactggatgcatgcagttcttacgttgccaggtattgcggcgttagtgctcggagtaggtatcgcagttgatgcgaatattattacgtacgagagactgaaagaagagttgaaaattggtaagtccatgatgtcggcattccgcgctggtaaccatcgttcattagcaacaattctagatgcaaacgttacaactcttgcggcagctggtgtgttattcgtttatggtaatagctctgtaaaaggattcgcaacaagtttaatcgtaagtattttagttggttttattacgaacgtattcggtactcgtttcttactaggtttacttgtaaagagccgttactttgataaaaaaccaggatattttggtgtgaaacaaaaggatattattccattaacaaaaggtgtagtacatccgccaacgagatttgatcgtattaacttcgtaaatatcggtcataaattccttatcttctcgattgtagttgtaattgcgggtgcaattatcttaccaattttcaaattgaatcttggtattgactttgcaagtggtacacgtattgacttgcaatcaaaacaagccgttacggtgtctgatgttcataaagattttaaagaactgaacattgatgtgaaggaagaaaatattgtaccgactggagatgacaataaaggtttcgcagttcgtacattaggtgttttatcaaaagatgaaattgcgaaaacaaaaacattcttccacgataaatatggtacagatccaaacataagtacagtttcaccgacaatcggtaaagaaattgcacgaaatgcatttatcgctgtactgattgcttctgcggttatcattttatacgtaagtattcgattccgatttacgtatgcgttatctgcagtacttgcattattacatgacgctttcgttatggttgttatgtttagtattttccaactagaggtagacttaacgtttatcgctgcagtactaacaatcatcggttattctattaatgactcgattgttacatttgatagaaaccgtgaattatacaaacagaaaaaacgagtgcgcgatataaaagatctagaagaaatcgtaaatgcaagtattcgccaaacgcttggtcgctcgattaataccgtattaacagtgttattcccagtaattgcactgcttatcttcggtagtgagtcactacgtaacttctcgtttgcgttacttgttggattaattgtaggtacgtactcttctgttttcgttgcctctcaaatttggttaatgcttgaaaaccgtcgtttgaaaaagggaaaaaacaagaagaaggttgagaaagtagaatctgaaccgcaagtatagaaaagatgatgtctctttatgaggcatctcttttttcgtttgtggatacaataagatagcaactttttaacagaaagaagatggaagaaagtggtggtgttatcgctgtttttgttaaaataaaaagataggttaagaaaagaagggattttaattatggaaaaagatgaacgttttaaacaggccgagtttggtgccattgtcgggatcgttggtaatattatattagcgattgtaaaggcggtaattggttatattgggaacagtaaagcgctattagcggatgccgtgcattctgcatcagatgtaattggttcgctagctgtactttttggattgcgagcggcaaagcagccacctgatgaagatcatccgtatggtcatggtaaagcggaatcgatttcagcgattattgttgcggtattattatttattgtgggacttgaaatcgcgatttcatctataaaagctttttcgcaagaactagaaccgccgaaaggaattacgatatttgctgttgttctttcaatcgtcgtgaaagaaggaatgtttcaatataaattccgattagggaaaagggtaaatagtgatgcaattattgcaaatgcatatgagcaccgttcggatgtgttttcttcaattgcagctttaatcggtatttgtgcagctatactcggtggtaagcttggtatagactggcttgtatatgctgatccgattgcaggattagttgtttcgcttcttgttgtaaaaatggcatggagcattggagcggaagcaattcatgcaacgcttgaccatgttcttcatgaggaggatgttattccgcttagagaggccgttcttcaagtagatggtgtgaaaaaaattggttctttatatgcacgggagcatggtcattatgttattgtcgatattaaagtgtctgtagatccatacattaccgtagaagaaggacaccgtattggaaaacatgtgaaagaaatacttatgaaacaagataatgtacaaaatgtattcgtacatataaatccgtattctccaaattaaacatcattaacattttagtatatagatattgcatcgtagtttgcattatattgtcaccccttaatctgtcttgtataatgaacaggttaaggggtgatttcgtgttacaaccgaagacgcgttggaaagaaaaagaatataatgacgagcgagtgagtgaattagcaagtaaattacagttatcgccacttgtcgtttcattattcctcggtagaggactagatacagaagataagattttagattttttaaatacagaaaatcaagaatttcatgatccatttttattagaaggaatggatagaacggtagaacgtgtaaataaggcgattcaaaatggagagcaaatattaatatttggtgattacgatgcggacggagtaagtagtacgacggttttatatcttgctcttcaagaattaggtgcagaagtagaattttacattccaaatcgttttacagaagggtatggaccgaacgaagaagcatttcgttgggcgcatagtgcaggtttctcactgattattactgtcgacactggcatcgcagcagtacatgaagcgaatgtagcgaaagagcttggaatagatctaattattacagatcaccatgagccaccgccagaattgccagaagcgcttgcgattatacatccgaaattagaaggtggcgtatatccgtttcactatttagctggtgtaggtgttgcgtttaaagttgcgcatgcactattaggccgtgtaccagaacatttattagagattgcagtaatcggtacagtagccgatttagtatcacttcatggtgaaaataggttgctagtgaaacgcggtttaaaacatatgcgtatgacgagaaatattggtttgaaggcattgtttaaagttgctaacgtttcgcaaagtgaaattacagaagagagtattggcttctcaattgcacctcgtattaatgcggttgggcgtttagaagatgctgcgccggctgtacaccttttattatcagatgatccagaggaagcgaaagagttggccgaagaaattgatgagctgaacaaactgcgaaaagatattgtaaagcaaattacagaagaagctatcgctgaagttgaaaataaattcccgccagaagaaaacaaagtattagtacttgcaaaagaaggctggaacccaggggtaattggaattgttgcttctaaattagttgaacgtttttatcgtccgacgattgtattaagcatcgatcctataaaagaaacagcaaaaggctcagcacgtagtattgcaggatttgatttgtttgcaaacttatcagattgtagagagttattgccacacttcggagggcatccgatggcagcgggaatgacgctacatatgaatgatgtagatgaattacgtcgccgattaaatgaacaagcagatgcgattttaacagaagaagattttattccaattacagcagttgatgttttttgcaaagtagaggatgtaacgctagcggcaattgaagatatgcaaaaactagccccgtttggtattggaaatccgaaaccacgtattgcagtaaaagatgcagagttagaaagcattcgcgcaatcggatcagatggttctcatttaaaaatggctcttcgtgatggacaagcaacactggatacaattggatttggttttggtgcatatgctaaagaaatctctccagttgcaaaagtatctgtaataggagaagcatccatcaatgaatggaataattttaagaagccacaactaatggtacaagatattgctgtagaggcgtggcaattatttgattggcgtagtatgcgtaatgcagaagcaaatttagcagaacttccgaaagaaaaaataacaatggtgtatttttctgaagaggtattgaataaattttctttagagagctataaagaaaagctcatgcatgcttcagaagtaacgcatttagatgatcaatatatcgtgttacttgatttaccaaaaggaaccgatgaattacgtgagttatttaaggcaggattcccagcgcgaatttatacgctattttatcaagagaataaccacttatttagtacagttcctacgagagaacactttaaatggtattattctttcttaaaccaaaaaacaccattttctttaagacaatatggagaacaactatgtcgtcataaaggttggtcaaaagatacagtaaattttatgacacaggtgttttttgagttagaatttgttacaataaaagatggcgtcatttttatggcagacaaaaaacaaaagcgtgatttaattgaatcgaacacatatcgtgagaaaatgaaccacttacaattagaaaaagaattggtttatagcacatatcagcaactatatacatggtttgaaacgattcgtaatcataaagaagtagaacagttagggtaaaggatttgtatttacaaaccttttagatctgaggaggattcagaaatatggatttcaagcaacatatcgcaattgtaccggattatccgaaagaaggtattgtgtttaaagacattacacctttaatgaatgacggtaaagcatacaaagcagcaacagatgcaatcgttgaatacgcaaaagaaagagatatcgatgttgtagtaggaccagaagctcgtggtttcattatcggttgcccagtttcttatgcgttagaagtaggatttgcgccagttcgtaaattaggaaaattaccacgtgaagtaattacagttgactacggtaaagaatatggtaaagatgttttaacaatccataaagatgcaattaagccaggtcaacgcgtattaattacagatgacctattagctacaggtggaactatcgaagcgacaattaagctagttgaagaacttggcggagttgtagcagggattgcattcttagtagagcttacttacttagatggtcgtaaaatgttagatggttacgatgtattagtattagaaaaatactaatcactatataggtaaaactacggtgataaaaagtacccgtgaatctcttggagaggagcgggtacttttgtataattgaacaaaaaatcatggtgaaatgtcagtaaaatcttttccttttcacaattcacaatcattgggttataatgatagaatataatttattctattaaataaagataaagtcaattttcaataaaaggtgattcgatggcaaatgagcaggtactaacagctgaacaggtactcgagaaagcaagtcaatatttagtggatgaagatattgagctagtagcacgtgcctatgaatatgcacgcgatgcgcatagcgaacaatacagaaaatcgggtgaaccgtatattattcatccaattcaagttgcaggtattttagttgatttacacatggatccagctacggtatcagcaggtttcttacatgatgtagtggaagatacagagattacgttagaagatattgaacgggaatttaacaaagaaattgctatgcttgttgatggtgttacgaagcttgggaagatcaaatataaatctcacgaacaacaacaagcagaaaaccatcgcaaaatgtttattgcaatggctcaagatattcgagttattttaattaaactagctgatcgtcttcataacatgcgtacattgaaacatttgcctcaagagaagcagcgtcgcatagcgaatgaaacgctagaaatctttgcacctttagcacatagactcggaattagtactattaaatgggagctagaggatacgtcacttcgctatttaaatccacaacaatattatcgtattgtaaatttaatgaagcgtaaacgtgcagaacgtgaagaatacttagacgaagtaatgactggtattcgtgagaaattaaaagaagttgcaattcaacctgagatctctggaagaccgaaacatatttacagtatttatcgtaaaatggcactgcaaaataaacagttcaatgaaatttacgatttattagctgtacgtgtcgttgtaaatagtattaaagattgttatgcagtgcttggaattattcatacgtgctggaagccgatgccaggtcgttttaaagattatattgcaatgccaaaagcaaatctatatcaatctcttcatacgactgtaattggaccgaaaggtgatccacttgaagtgcaaattcgtacgaaagaaatgcacgaaattgcagaattcgggatcgcggcacactgggcatacaaagaaggaaaaacagcagaaacaacaggtacattagagaagaaactcacgtggttccgtcaaatattagaatggcaaaatgaagcttctaatgcagaagaatttatggagtcattaaaaattgatttattctctgacatggtattcgtctttacaccgaaaggcgatgtaatggaattaccacttggatcggttccaattgatttcgcgtatcgtgtccattcggaaattgggaataaaacaattggtgcaaaagtaaacgggaaaatggtgacgctggattataaattaaaaaccggcgatatcattgaaattttaacgtcgaaacattcatatggcccaagtcaagattgggtaaaacttgctcaaacatctcatgcgaaaaataaaattcgtcaattctttaagaaacaacgtagagacgaaaatattgaaaaaggccgtgaacttgttgaaaaggaagtacgtggtctagagtatgagatgaaagaagtattagcgcctgataacttaaaacgcgtcgcggagaaatttaactttgcaaatgaagaagatatgtttgcagcagttggatatagcggaattacagcttcgcaaattgttacgcgactaacggacaagttccgcaagcaacgcgaagaagaagaaattgttgaagtcaaagaagttcgtaaaccgatgaaaattcgaaaatgggattctggtgtaaaggtaagcggtgctgataatttattaatccgtttatcgaaatgctgtaacccagttccgggtgatgatatcgttgggtatattacgaaaggccgaggtgtatcgattcatcgccgtgattgtgtaaatgttcatacagaagaagcgatagaacgtttattagaagttgagtgggaaggtagccctgaaaaagaaatagagtataacgttgatattgaaatttcaggttacgatcgccgcggtttattaaatgaagtactgcaagctgttacagagacgaaaacatacatttcagctgtttctggtagaagtgaccgtaataagatggcaacaattaatatgtcaatctcgattcgtaacttacaacacttgaaaaaagtagtagaacgcattaaacgcgttccagaaatttatgcagtacgacgcatgatgcattaatagggagtgtagaaagatgagagttgttttacaacgatcaaagaaagcgtctgtcacagtagacggtgagatcgtaggacaaattccgttcggtttaacattactagttggcattacgcacgaagatacagaaaaagatgcaacttacattgcggaaaaaattgcaaacttacgtatttttgaagatgagagcggaaagatgaatcattctgtacttgatgtagaaggacaagttctatctatttcgcaattcacattatacggagattgccgcaagggaagacgtccaaactttatggatgctgcgaaacctgattatgcagagcgtttatacgatttctttaatgaagaagttcgtaaacaaggattacatgtggaaacagggaagttcggagcaatgatggatgtttctttaatcaatgatggtccggtgaccttaattgtagaaagtaaatagtgttgataaaaaagagagggttatataatcctctcttttttatacattgttgtatgttttgttcatttatttggaattaatagcagtttcggttatgtataactctcccatcaatatggaacaataaaaagtaaaacatccatattgaatgtgagggatatacgtatgcgtatgaatgaaaaagggcattctgttacaaatggtgcaaatcaactatttaacgtgaattttcatgattttatttcaaaagagcaaaacaatacttcaatggagcttgcttccgagtttgggatttctcttcaagatgtaaagcgtttaaagaagcagattgaacgttcttagagcacttgacaatcctacttaacaaacgtatagtaattttatatttacatatgaatataaccgttgatagagaagagtaaatgagacacacatggaaagagaaggaatgtcttaggctgaaaacatttctgcatgatgactgattgaatgacactctagaggtttcaacttgaacggcatatacgcttagtagggatgaacgcacatttaagcgttattaaaaaagtggaagcatacgtgcttcaattagggtggcaccacgggtataatactctcgtccctactgtttaaacagtagaggcgggagtttttttatttttattaagattaaaacaatttgaggaggaactgaatatgtctattcaaatcccacgcggaacgcaagatattcttccaggcactgttgagttatggcagtatatcgaagggcaagcacgcgaaatttgccgtcgttacaattataaagaaattcgtacaccaatttttgagcacactgagctatttttacgcggtgttggtgatacgacagatatcgtacaaaaagaaatgtactcattccaagatcgtggagagcgcagcttaacattacgtccagaaggtactgcacctgttgtacgttcttatgttgaaaataaaatgtttggtgatgcaacacaaccaacgaaattatactatatcggtcaaatgttccgttatgaaagaccacaagcaggtcgctatcgtcaattcgtacaattcggtatcgaagcaatcggcagtaatgaccctgcaattgatgcagaagtaattgcacttgctgttgaattttaccgcggcatgggcttaaaaaatattaaagttgtattaaacagtttaggtgacgcagcgagccgtcaagcacaccgtgatgcattaatcgcacactttgagccacgtatcggcgaattctgttctgactgtcaatctcgcttagaaaagaatccacttcgaattttagactgtaagaaggaccgtaaccatgaattaatgggaacagcaccatctattacagaatacttaaacgaagattcagcaatatactacgacaaagttcaagaactattaacgatgatgaatgttccgtttgaaaaagatccgaacttagtgcgtggtttagactactaccaacacactgtttttgaaattatgagtgaggcagaaggtttcggtgcgatcactacattaagcggtggtggccgttataacggacttgtacaagaaatcggtggaccagaaatgccaggtatcggttttgcaatgagtattgaacgtttaattatggcgctaaaagctgaaaacattgaattaccacttgaacatagcattgattgttacgttgtggcgcttggcgaaaaagcgaaagaccatgctgcaaaagttgcgttcgatcttcgtaaagctggattgtcagttgaaaaagattatttagatcgcaaaatgaaagcacaatttaaatcagcagatcgtctaaaggcgaaatttgtagctgtattaggagaagatgagctagataaaggcatcattaacttaaaagatatggcaacaggtgaacaagaagaagtagcgttagatgtatttgcttcatacgtagcagagaaattaatatagggggaacttacagtggctgaaagaacacatgcatgtggaaaagtaacagtagaagctgttggacaaacagttcaattaaaaggttgggtacaaaaacgccgtgacttaggtggattaatctttatcgacttacgtgaccgtacaggtatcgtgcaagttgtatttaacccagaaacatcaaaagaagcgttagaagtagcagaaacaattcgtagcgaatacgtattacacgtagaaggtacagttgttgaacgtggtgaaggcgcaattaatgacaatatggcaactggtcgtattgaagtacaagcaacgaaagtaaatgtactaaatgcagcgaaaacaacgccaatcatcattgctgatgatacagatgcatcagaagatgtgcgtttaaaatatcgttatttagacttacgtcgtccagtaatgtttaacacattcaaaatgcgtcatgacgtaacgaaaacaattcgtaacttcttagacacagaagagttcttagaagtagaaacaccaattttaacgaaaagcacgccagaaggagctcgtgactatttagtgccaagtcgtgtacatgatggtgaattctatgcattaccacagtcaccacagttatttaaacagcttcttatggtcggcggatttgagcgttactatcaagtagcacgttgtttccgtgatgaagatttacgtgcggatcgtcaaccggaattcacgcaaatcgatatcgaagcttcattcttaacacaagatgaaattttagatatgatggagcgtatgatgacgaaagttatgaaggatgcaaaaggtgtagaagttagtgcaccattccctcgtatgaaatatgctgatgcaatggctcgctacggttctgataagccagatacacgctttgaaatggaactaacagacttatctgagtttgcagcaggttgtggctttaaagtgtttacaagtgctgtagaaagcggcggacaagtaaaagcaatcaatgcaaaaggtgctgcaagtaaatattctcgtaaagacatcgatgcattaactgaattcgtgaaagtatacggtgcaaaaggtttagcttggcttaaagttgaagaagacggtttaaaaggaccgattgcaaaattcttcggtgaagaagatgcaaatgtgttaatgagcacattagaggctactgctggcgacttattactattcgtagcagataagaagagcgttgttgcagatagcttaggcgcacttcgtttacgtctaggtaaagagcttgagttaattgatgaaagtaaatttaacttcctatgggtaactgattggccacttcttgagtacgatgaagatgcagatcgttacttcgcagctcaccacccattcacaatgccattccgtgaagacgttgagttactagaaacagcaccagaaaaagcacgtgcacaagcatatgaccttgtattaaacggttatgagcttggtggtggctcacttcgtatttacgagcgtgacgtacaagaaaaaatgtttaaagcacttggattctcacaagaagaagcgcaagagcaattcggattcttattagaagcattcgaatacggtacaccaccacacggcggtattgcattaggtttagatcgtcttgttatgctgcttgcaggccgtacgaaccttcgtgatacaattgcattcccgaaaacagcaagcgcaagctgcttattaacagaagctccaagcccagttgcagaagcacagcttgaagagttaaacttaaaattaagcttaaaagaagagaagtaagaatagggtctagatggttatactataaccgtctagactttttttgagaggttgtttaaaaagtccggtttagataactgtcgcatctcatcgttgcttcgccagtccggtgctcgagtagtatttttctacactgcgctcctcctggcttcagcgcctcgatctgctcggttctctgaatcctcttttttaaacgtgtattgaaaggaagtttaaaaagtccggttcagataactgtcgcatctcatcgttgcttcgccagtccggtgctcgagtagtatttctacactgtgctcctcctggcttcagcgcctcgatctgctcggttctctgaatcctcttttttaaacgtgtatttaggaagaaatgaaattctggtctatgttttcattttcgaaatatgtatttttaggaattctataactttttctatacaaatagtcggaaaaacgctagaatacatggtagaccatttttgtaataggagtgtagagctgaatgttacatcaattttcacgtaatgaattagccttcggtaaagaaggacttgaaatattaaaaaatagtacagtcggtattttaggaattggcggcgtaggttcattttcagctgaagcgttagcgcgttctggagtaggacgtctcgtattagttgataaagacgttgtagatattacaaacgtaaaccgtcaaattcacgctttagtatctactgtaggacgttcaaaagtagaattaatgaaagagcgtattgcagacattaatccggaatgtgaagtaattggactagaaatgttttatacagatgaaacatatgaggagttctttaaacacggtttagatttcgtagtggatgcatctgatacgattacgttcaaaatccatttaattaaacaatgtttacgtcgtaaaattaaaattatctcatgtatgggtgcagcaaataaaatggacccaactcgtttccgtattgcggacatttctaaaacacacacagatccgattgcgaaagtcattcgtacgaagcttcgtaaagagggtattaaaaaaggtgtaaaagttgtcttctctgacgaaaacccaatcgtaattcgtgaagaagtacgtaaagaaatcgtaccagacgaaaatgcaaaaattcgtaaagcgaaattaccgccttcatcaaatgcattcgtaccatctgtggcaggcttaattatggcaagtcacgttgtacgtgaacgtattaaaaatgtagaagtgaaacgtgtagggcaagaataaaagaaaagcatatatccattttggatatatgcttttttatatgtattaaagaaatatggatatttgcattactactagttcaaatgtaagtaaggttagtaagtaaaaatcatatttatctgatttataggcggatgtcttttttagactgttaatggtgaaaagagctaaagttaggacgagaaggccaagagttattttgaagattattaatgaaatagcaaccatccccctttaaaggtatatgtttataataatattttagtaaaaaatatctaatccgttttaggagtttccttgtatgacaaggaggaatgttattgtcaatctttgtcgttaaatcgatatcctttattgaatcgttgatatattgcaagttgtgatagatatattcgaaaaatcgttgatatattgcaagttacgatagatatattcgaaaaatcgttgatatattgcaagttacgatagatatattcgaaaaatcgttaatataatttcatttaccgacatgtatatatatgatttaccgaaaacaaacaaggatgtcactcagttaaaaaagtgacatccctgtttttaattctcagcagaataaataatatctaaattcccgttttgatcggttttgaaaatcggggcaatttgctcttcttgctcttcgactgaaacaagttttcgagcacgatccataattcgaacaagcatcgcgtaatcttcttcgattgcttgttgtttttttgtgagtaccgctaatttcgtttcaagttcatgattcgttttttgcagagaagtgagctgagcttgtaatacatcattttcagtttgcaactttgcgagtgaagggttattatgctccaagttttgcaaaaatgagatgacattttgcatcgtaagttcttgtttacttggcgtaatatcttcagaaaactcagcatcgattacgagttgtttcgttttcgtgaactgatttttttctattttagcttcagagcgctttaattctttacgttgtttcttcgcaagctgcacagcatcttcgtaattcggtcttacttcagcattccatctaaagccgcaagctgctgaagtccggttcaacgtatcgccgacttcatcaaatgcttttatttgtgtacttccgctgcgaatatgtcgtaaaacagtttctgctaaaaggagatcatcttcttttgtccatgcatcttgacgtgttttcataagcgaagcctccataatggtgacgttttcgtttatgttaccctttatttttcgttttattcgaagtttgtaatctttcataaacagtagaaagtgcttgctcaaatttccctgtcgttttcggtttataatattgcttgttttttattttatcaggtaagtattgttgccttacccagccgtttggatggtcgtgtggatataaatatccaatgcctcttccaagtgattctgcgcctttgtaatgactatcttttaaatggcttggaatgtcacctgtttgaccgttgcgtaaatcgtgtaatgcagcatcaagtgctttataagctgaatttgattttggtgataagcatagctcgataacggcatttgcaagtgggatgcgtgcttctgggaatccaactcgttcagctgattcaattgcagctagtgtacgtggtccagcttgtgggctagcaagtccaatatcttcataagccataataagaaggcgtctgccaatactttgtaaatcacctgcttcaataaggcgtgctaaataatggagcgctgcatttacatcacttccgcgcactgatttttgaaatgctgataatacgtcataatgagcatcgccgcctttgtcgtgaacgaagctcttcttttgtaagcattcttctgcaatctcgagtgtgatttcagccgcttgatcgtctgtagtaaagctagataatacagcaagctcaagtgcgttataagcggaacgcatatcaccaccagaggcgtttgcaaagtgatgtagtgcttcatctgttaccgttacagcatattctccaaggcctttttctttatcttctaaagctctttttaacccaattaaaatatcatcttctgttagtgcgtgtaattcgaaaatttgacacctgcttcgaatagcggagtttattgcatggaatggattacttgtcgttgcaccaattaaagtaagaagtccgctttctaagtgaggtaatagaaagtcttgctttgctttatctagacggtgaacttcatctaaaattaaaacgaggtgtcgatgcatcttcgcttcttgtacgacaacttccatatcttttttattgtgagtaacagcattcaatagacgaaacggggtaccggtacttccagcaattgcactggcaatggatgtttttcctgtacctggaggaccgtataaaatcatagattgaaaatgattggcttggaccattcgccataaaatctttccttcaccaactaaatgttgttgcccaataatttcttgaatatttgtagggcgcattcgatgtgcgagtggttgtttcatttggaccgtctcccttaatatataatctcgttctatcgtatcatttttttctacgaaatttgaaataggatgctgttttatgggaaaaataaatgataatattttcatttttctttcaattgtaataattcccgagtttttcaatgcgattttatgttatcattttgatacacaagttgaaatttcttataatactatattatgctataatttcataggattttaaattgtgttctttttataaataagatataaccaatagaagtgaaaatttgaaaagaggtgcaaaatagatgaaaatttcaacgaaaggccgctatggcttaacaattatgattgatcttgcaaaaaagtttggtgaaggtccgatttcattaaaatcaattgcgcaggcacatgacttatcggaacattacttagagcaattaatttcaccacttcgtaacgcgcgtctagtaaagagtacgcggggagcatatgggggatatgtactatcagatcagccggctaacattacagctggagatgtaatccgtgtattagagggtccgattagtgttgtagaaatgatagaagaagaagaaccagcacaacgccaattatggatgcgtgttcgtgatgcggtgcaagaagtgttagatagtacaacgttagaagatttagtacgttatgaggaagaaaatcacgggggctatatgttttacatttaattccttgtgaaacgatttggaaagaaggagatttaatggaacgcatttacttagatcatgctgcgacatctccgactcacccagaagtggtcgaaaagatgattccatatatgacagaaatattcgggaacccgtctagtattcacttttatggacgtcaaactcgtcacacagtagatgaggcgagaagagtgtgtgcacgcagcattcatgcgaatccgaatgaaattatatttacgagcggtggtacagaagctgataatttagcgcttatcggtgtagcacgtgcgaaccgtcataaaggtaaccacattataacgacgcaaattgaacatcatgcgattttgcatacgtgcgaattgttagagcgtgaagggtttgaagtgacatatttacctgtcgatgaaacagggcgcattcaagtttctgacatacaaaaggcattaacagaagagacgattcttgtatctgttatgtttgggaataatgaagtagggacgatgcaaccgattgtggaaataggaaagctgttaaaagagcatcaagcgtatttccatacagatgcggtacaagcttacggtttagtagaaattaatgtgaaagagtttggtattgatttattatcaatttcagctcataaaattaacgggccaaaaggtgtaggtttcttatacgctggtacaaatgtgaaatttgaaccgttattaataggcggagagcaagaaagaaaacgccgtgctggtacggaaaatgtgcctagtattgctgggcttcagcatgcaattcttatagctgaaaaaactcgtgagcaaaaaaatgcccaatatgaagagtttaaagatataatggtatctgtcttcaaaaatgaaggcattactttcgaggtaaacggaaacttagaacatcgcttaccgcatgtacttaatgtaagttttacaggaatgaacattgaaccgtttcttgtgaacttagacttagctggtattgcagtatcaagtggttctgcttgtacagctggttcgattgatccatcacatgtattagtagcgatgtttggaaaagactccgatcaaatacgttcatccgtacgctttagttttggacttggaaatacgaaagagcaaattgaaaaagcggcgtacgaaacagtgaaaatcgtgaagcgattaacacaaaattagtatgggaggtgacatgatgaacaaactacctcacgaaacacgcgttgtcatcggaatgtccggtggcgtcgattcatctgtagcagcacttttattaaaagagcaaggttatgatgtaatcggaatttttatgaaaaactgggatgatacagatgagaatggtgtctgcacagcaacagaagattacaatgatgtaattgaagtgtgtaaccaaattggtattccgtattatgcagtaaactttgaaaaacaatactgggataaagtatttacgtacttcttagatgagtaccgagctggtcgcacaccaaacccagatgtaatgtgtaataaagaaattaaatttaaagcatttttagagcatgcaattgcgcttggtgcggattatgtggcaacaggccattatgcacgcgttgcttatatggacggcgaatataaaatgcttcgcggtgttgatgacaataaagatcaaacatatttcttaaatcaattaagccaagagcaattatcaaaaacaatgttcccgttaggtgaattaaagaaaccgcaaattcgtgaaatggcgaaagaagctggcttagcgacagcggcgaaaaaagatagtacaggtatttgcttcattggtgagcgtaactttaaagatttcttaagtaactacttaccggcacaaccaggtgtaatgcaaacattatctggtgaagtgaaagggaagcatgacggtttaatgtattatacaattggacaacgtcatggccttggaattggtggtaatggtgacccatggtttgctgttgggaaaaatctaaaagaaaacattttatatgttgatcaaggattccataacgaacttctatatggtgatgaagttattgctacgaatgtaggatgggtaagtaacaaagaaaaagaaacagaatttaagtgcacggcgaaattccgttatcgtcaagaagacaataaagtaacggttcaaatcgttgatgaaaatacagttcgtattctttgtgatgagccaattcgtgcaattacaccaggacaagcagtcgttttctatgatggagatgagtgcttaggcggtgctacaattgatgaagtataccgtagtggtaagaaattggattatttaggataaatgagaagcctctgccgattagcggttagaggtttcttttacataaagcgaattttcgttcgcttggaaaatacattctttgttataatttgttgtagaggtgaaggacatgtcaaacaaacttgaaacaggtattcaatatatgcaagaaggaaactgggaagaagcagctaaaaattttacagaagcaatcgaagaaaatccgaaagatgcgcttgggtacattaattttgcaaatttattagacgtattaggtgatagcgagcgagcgattttattttataaacgtgcactagagttagatgataaatctgcagcagcctattatggtttaggaaatgtatattatggccaagagcaatttactgaagcgaaagctgtatttgaacaagcaatgcaagctggattacaatcagctgatgtaacatttatgttaggtatcacacatgtacagcttggaaatgatcgtcttgcactaccattcttacaaagagcaacagaattagatgaaaacgatgtagaagctgtattccagtgcggactttgcttcgcgcgattagaacacgttcaagaggcgaaaccttattttgaaaaggtattagaaatggatgaggagcatgcagatgcgtattacaatttaggtgttgcgtacgtatttgaggaaaataatgagaaggctctcgctttatttaagaaagcaactgaaattcagccagatcactttttagcgggtaatggcgttcgtttattagagcaagaagctgaataagataaaaatatagtttaatgggtagttatccctcatctaaaaaggtgggggatgtactgctcattaaagtgaaaataccggaaaggagaggaaaaatgggaaatcaacatgcaatggatttgtttgaggaagagaaaaagtttataaaagcgcaagttcttcataccattttccacaacgaagaaaacctctattccgttgtcagtatgaaagtcattgaaacgaatgaaacgtatgacgaaaagaaagtaatgataaacggtcattttccccgcatgcatgaagatgaagtgtttacattgacaggtcattttaaggaccatccaaagtatggaaaacaatatatggttgaaacatttaaaaaagaattgccgcaaacaaaagcaggtatggtgcaatatttagcgagtgatttatttaaagggataggaaagcgtacagctgaaaaaattgtggaccatctcggagaacatgctatttctaaaattatggatgaccctgaggcattaaatggtgttgttaataaacaaaaggctcaggaaatatatgagacaattgttgaacatcaagggctagagaaagtaatgagctttttaaatggctacggttttggaacgaaactttctattaagatttaccagcaatataaagagatgacattagaagtgattcgtaataatccgtatcaacttatcgaagaagtggacgggattggttttggaagagcggatgatatagggcgtgcgttagggatatcgggtaatcatgacgaccgtgtacgcgcaggatgtttttacacattagagaatgtctcattacaacttggtcacgtttatatgaggaaagatcaacttgtaagagaaacgatgtcacttttaaacaatcaagaaggaagagtgactgaggaagatattataggttgtattgaaacgatgcaaagtgaagggaaagtcatcatagaagaagaacgagtgtatttagcaacgttattctactctgagaaaggtgttgtaaagtctattcgcaggcttatgaatcaagaagaaacaccttcatttccagaagcagaagtgttaaaaacgttaggtgaaattgaagaacaactgaacgtacaatatgcaccgtttcagcaagaagcaattcaaacggcacttcataaaccgatgatgttattgacaggtggaccaggaacagggaaaacaacagttattaaagggattgttgaaatgtatgcatcactacacgggttatcgttaaatccgaatgaatacagtgatgataatccatttccaatactattaacagctccaacaggaagagcagcgaagcggatgagtgaatcgacaggacttccagcttgcacaattcaccgtttacttggttggacgccagaaggatctttccagcgtaatgaaacggatcctgtccaaggtaagctccttattatcgatgaattttcaatggttgatatttggcttgcaaatcagctatttaagtcgttgccgacgaacattcaagttatcgttgtaggtgatgaagatcagttgccatctgtaggacctggacaagtattaaaagatttattaaatgcaggcgcagttccgacagtgaagcttactgaaatttatcgtcaagcggaaggctcatcagtgattcaacttgcccatgcgataaaaaatggaactctaccaccagatttagcacaaaatcaaaaagatcgttcatttatcggctgtacaggagctcaaattgttgaggttgtgaaaaaagtttgtgaaaatgctaaaacaaaaggctttagcgcaagagatgtacaagtattagcacctatgtaccgtgggcctgctggtattaatgtattaaacgaagcgctgcaacaagtatttaatccgaagagggaaaagagtaaagaaattgcttacggtgatgttgtgtaccgaagaggcgataaagtactgcaactcgtgaatcagccggagagccaagtgtttaatggtgatattggggaaattgtttcggtgttttatgcgaaagaaaacgttgagcaacaagatatgattatcgtttcatttgacggaattgaggtaacgtatacgaagcccgatttaaatcaaattacgcatgcatattgttgttccattcataaatcacaaggtagtgaatttccgattgttattatgccaatcgtgaaaagttacaaccgtatgttacgtcgtaatttaatttacacgggcattacaagaagtaagaagttccttattatttgcggagaggaagcagctttccaatctggtgtaaatcgccttgatgatgcaatgcgtcaaacaaccttagctagtcgcttgcaagaatcacaaggagaagtacagatggtcacagttaatggcgaggaaatggacgtggaaaacatttcaccgtatgatttcatgtaacaaggtgaaattatatagtgaaactttcaaacgcatagcgttgaaaggctccagtaaaatgtataaatgaatgcagtttggacataatggcgaatagaatctgggagactgtaaggagatgaaagccatatgtttatttgtccaaattgcaaagggaaagacattggaaaaataggtgtcaaccaattttattgctggaattgttatatcgaattatcggtttcaaaggggaaaatccatacgcatcaagttgaggaagatggttcactaagctctcttgatgatttatttgatgagaatgaaagaacgatcggataacgaaaagggggatttactttgaatctacgcaattcattaatcgcattaggtgttggagctgcagcatatcaatatgctcgtaagcaagatgtattttcaaaacgcaatatgaaaaaagcacgtaagatgattaagtcttacttataatcatttcgataaagtgaaaaactcccttgtagacaagggagtttttttatgcacccatatgtaaataaaaaagtccgatctctgagaaaagataagatagaccgtagcagccaacgccaagtattccatactgccataattgcttcgctttttctttacgtgaggaatgaataaagaaccccttccaaataccgaacccgatacaaatccattcaagaatcataaaaagtgctgataatccaagcataaacaaaaccataattagccctcctgattatattaattcatgctgtattctcaggggtggttgtccttgttatgttatttatatgtacgtctttaaaaaacagtatggtccgtatgaaaagattttaaaagtttcgcacataacctaccccatttattttcaaaataaaggtggaggaggtttttcatgtgaagaatcttaaaatcatttggatatatcgtttaggattattgttacttgtttttctttgtctgctcgtctttttaaaaattaagccgctatgggcaccgattatttttgtatttaaagtagcaatcacgccgtttcttatcgcgtgttttattgcgtatttattgcaccctttaattgaaaaaattcataaggaagggatgccccgtacacttgccattttgctcatttatatccttttctttggcggaattggttatgggatttataaaggaacaccagtcgttattaaacagttacaagagattaatgaacaatttccgcagtttacaaaaatgtacgattcgtggatggatggcgttacagaacaaacggcgaatttcccttcgttcattcatgaaaaggtgaaacaactttttgtgggtgtggaaacgaagattcaagcgcttttaaataaagtgatgagtacagctcgtggtgtactcgattcattgctcattattttcttaataccgttcattgtattttacatattaaaagattatggtgagttttatcatatcttttggaaactagtcccaagtaaatggcgaggtacggggcaaatgcttgcgaaagaaattgataaatcacttggaagttatattcgaggacagttatttgtttgtttagtattagggggagtatcagctctttctttttggtttatcggtatgaaatatccattattgcttggcattattattggggtaacggatataatcccgtacttcggtcctattttaggagcaatcccgacgttaatgattgcagcaacagtatcaacgagtttacttattaaggcggggatcacaattgcgattttgcaatttgtggagagtaacattttatcgccttacatcgttggtaagtcacttcgtatgcatcccgttattattatgcttgccttactagttgggggagaggtagctgggattgtaggattgctaatatcggttccgattttagcagttattcgcactgtcattgttcatgtgagaccgctcttgaaaaaagaagatgtgtaagtatagaagccctctatgtaagaaatagagggctaatcatatatttatttagaaagctgctcgtgtatcttttgaacgagggagctcacatcatttgtttgaatatgttttatttttttccattcgttatcatacataaatacaatttgattgttgaaaagacgcttttgttcttttagattagaaatttttgcgaaagagtactcttcaaatattggattcttacttacatctggcccataaaagaatagccttttgttcgttaaaactagcattcctggccttgcgacggaacgataaataaatatgtctaatgaacatgctgcgtaaaataatatcgtttcgtcagtcgctaatatgtttttagctttgctaagtaaggttgtcattgtgatcgctcctttattttattaacaataatttaattataacaaaaaagtaatatttagaaatttttataaattattcttataaggagattccgatttattaataaatgcatactatatgaaaaggctgttaagaatgaatagtagaatacttatgattaataagtaattaatccaatataaatgattatctacattgacaaacttaagagaattctattatatttagtcatataatacattaaatcaatgacggaacaagtacgttacagtccatttatagagagaagcttccatatggctgaaagaagctttaaatgaagggtaacagaaagctaatcctgagagcagctaatcactgccgtcttgccacgttacggcaccatgaggtgatgaattgattgttattgtaatcaattcataattagggtggtatcgcgagttaactctcgtcccttttatagggacgggagttttttatatttaaggaggaaaatacaatgaaacaactaacaggcgcacaaattcgtcaaatgtttttagactttttccaagaaaaaggacatgcagtagaacctagtgcatcactagttccgcatgaagatccatctcttctatggattaatagtggtgtagctacattaaaaaaatattttgatggacgtgtaatcccacaaaatccacgtattacaaatgctcaaaaatcaattcgtacaaacgatattgaaaacgtagggaaaacagctcgtcaccatacattctttgaaatgttaggaaatttctcaattggtgattacttcaaagaagaagcaattacatgggcttgggaattcttaacgagcgacaaatggatcggattcgataaagaattactatcagttacaatccatccagaagatgaagaagcattcacaatttggaatgagaaaatgggcgttccaaaagagcgtattattcgcttagaagaaaacttctgggatatcggtgaaggaccaagtggaccgaatacagagattttctatgaccgcggagaagcttacggtaatgactttagtgacccagaattatatccaggcggagaaaacgagcgttacttagaagtatggaaccttgtattctctcaatttaaccataatccagacggttcatatacaccacttcctaagaaaaacattgatacagggatgggtctagagcgtatgacatctatcgttcaagatgtgcctacaaacttcgatacagacctattcatgccgatgattgatgcaacagaaacaatttctggtgaaaaatatcgtaatggcgatttagaaaaagatatggcattcaaagtaattgctgaccatatccgtacagtaacattcgctgttggtgacggtgctcttccatctaacgaaggccgtggttatgtattacgtcgtttattacgccgcgctgttcgttattcgaagaaattaaacatcaatcgtccatttatgtttgaattagtaccggttgttggagaagtaatgaaagacttctatccagaagtacttgaaaagaaagatttcattgcgaaagttgtgaagaacgaagaagagcgtttccatgaaacacttcatgatggtgaagcgattttagctgaagtaattgcaaaagcaaaagaagaaaaaacaactgttatttctggagtagatgcgttccgtctatatgacacatacggtttcccaattgaattaacagaagaatatgcagaagaagctggcatgacagttgatcatgaaggttttgaaaatgaaatggaaaaacaacgtgagcgtgcacgtgctgctcgtcaagacgttgattctatgcaagttcaaggtggtgtccttggagaaattaaagtagcgagcgaattcgttggttacggtacagttgcaacagaaagtaacgttgttgcacttgtgaaaaatggcgaatacacagacagcttacaagctggtgaagaaggacagttaattcttgatgtaacaccattctatgctgagagcggtggacaaattgcagaccgtggttaccttcttgctgatggcgtgaaagttcttgtaaaagacgtacaaaaagcaccaaacggccaaaacttgcataaagttgttgttgaagaaggaacattaacgaaagatgcggctgtaaaagctattatcgatacgaaaaatcgtagtagcgttgtaaaaaatcatacagcaactcatttactacaccaagcattaaaagacgtacttggaacacacgttaaccaagcaggttctcttgtaacttctgaacgtctacgctttgacttctctcacttcggtcaagtacaagctgacgaattagaaaaaattgagcgtatggtaaacgagaaaatttgggaaagtattgatgttgagatttctcaaaaagcaatcgaagaagcgaaagaaatgggcgcaatggcattattcggtgaaaagtacggagatgttgtacgcgttgtacaagttggcgattacagcttagagctttgtggtggttgtcacgttgaaaatacagcttctatcggtattttcaaaatcgttgctgagtctggtatcggtgcaggaactcgtcgtattgaagcagtaactggtaagtctgcatacgaattaatgaacgatcaagtaggtttattaaaagaagcagcaggaaaaatgaaaacaaatccgaaagatattttaacaagagttgatggtctatttgctgaagtgaaacaactgcaaaaagaaaatgaatctcttgctgcgaaattaagcaatatcgaagctggaaacttaactgattctgtaatgacagttgatggtgtgaatgtattagcagcgaaagtaaatgttgcagatatgaacaacttacgtacgatgatggatgacttgaaaaataaattagagtcagcagttgttgtattagcgtctgttaatgacgataaagtaaacatcctagcaggtgtaacgaaagacttaattagccaaggttaccatgctggtaaacttgtgaaagaagtagcttctcgttgcggcggtggcggtggcggccgtcctgatatggcacaagcagggggtaaaaacccagctcaagtcgaagaagctttagcatttgtacaagagtacgttaaatctgtttcaaaataaagagatagtagtgtacaatggtagggagaggagaagttcttctccctatacttactatataagtgaggtgcttgaaatggacggttttgataaaacaatgaagtttagcattcaagatgaaaaacagagtgtccatgtaaatgatgtacttttaactgtgtatgatgcacttcaagaaaaaggctataatccgattaaccaaatcgtcggttatttattaagtggagacccagcatacatacctcgccataaagatgcacgtagcatcattcgcaagcttgaacgtgatgagttaattgaagagcttgtgaagtcttacttgaaacatcatcgtgaggagtagtttatgcggatattaggtttagatgtaggtacaaaaacagtcggagttgcaattagcgacgaaatgggctggacagcacaaggattagaaacaattaagattaacgaagaacgaggtcactttggttttgatcgtatttctgagttagtaaagcagtacaatgtggacaagatagtagtaggtttacctaaaaatatgaatggtacaattggcccgcgtggtgaagcgtgccaacaatttgcagaaaacctacgagagctgttacaattagacgttgtaatgtgggacgagcgtttgtcaacaatggcagcggaacgtctgctcatttcagccgatgtaagccgtaagaagcgaaagcaagtaattgataagatggctgcagtcgtaatcttacaaggatttttagatagtaaataagaggtgaccaaaatggaagaaaatcaaattacaattgtagacgaaaaaggtaacgaacatttatgtgaaattattttcacttttgacgctgaaaaatttggaaaaaaatcatacgtagtcttctctccaatcggtgaagtagacgaagatggagaccaaatttatgatgcaatggcttatgagcaaaatgaagaagagggcggaactttacttccaatcgaatctgaagaagagtgggaaatggtacaagaaatgttcaacactctagctgatgagcaagaagctgaataataagtactgaaaagatggacgacatacagtccatctttttttgtatttatatgtaaaatgaaagattttttgtcgaaactgtgtaagtctttgtagtataatgagacggattgtagaaaaataaagtgtcaattaaaaaagataagtgaattttttgcgtttttacatcgtgctgtatagaaaggtgtacatacggtctacaattaagtaaggaggaaatgttttgatagagaatcaagtgaaaaagaagcgtagacgtatctttttattttcgattattgcactgcttttagtttgtggttcagtctatgcgtatatttcatccgcattaggaccagttgatagcgggaataaaaaagagattgaagtagaaattccgaaaggatcatctacaagtaaaattggagaaattttagaagaaaaaggcgctgtaaaaaacggtacagtttttagtttttatacaaaggctaaatcgaaaagtttacaagcaggtacatatttattaaatccttcaatgaatgctgaagatgtgattgaacaaatgtcatctggcaacgtgcatcgtccagctctttataaagtgacgattaaagaaggggcgcaagtaactgaaattgcagaaacgattgcgacagaactaaagtggaataaagatgatgttacgcgtcaattaaacgataaagcatttattcaaaaaatgcagcaaaagtatccgaagttattaacggataaaatctttgatagcaatattaaatacccattagaaggttatttatatcctgcaacgtattcgttttataagaaagatacgacgttagaagaaattgtaattccaatgcttgagaaaacaaatgcaatcattgttcaaaatgaggcgaaaatgaaagcgaagaattgggatgttcatcagcttttaacattatcttcacttattgaagaagaggcaactggttttacagatcgtcaaaagatctctagtgtcttttataatcgtttagcaaaaggtatgccgcttcaaacggatccaacggtattatatgcacttggaaagcataaacaacgtgtattatacgaagatttaaaggtcaactcaccgtacaatacgtatgttgtaaaaggattaccggtagggccgatcgcaaactctggtaaacattcagtagaagctgcgttagaacctgcgcaaacagattattattatttcttagctgcaccaagtggtgaagtgtactatgcgaaaacattagaagagcataatgcattaaagcaaaaatacattacgaaaaaatagtgaaatggggagggatagcgaaaaaagtcgcacatccctcttttttgtggtaaaatatatcgggttaaaaactggcagaagaatcgtttttaatatcaaaacgggacgtacaagctaaggataaagctggcttgtatttttattgcattctatgtgtgaaaagacgtcatagaggcacttctccatgtaaataaggaggaccatttatggaggatgcagttaacgagtacctattatcatttattgatccgaaagataaattaattcttgaaatggaagaatatgcaacagaaaatcatgtgccgattatggatcgacttggaatggaatttatgctgcaatttttacgtttaattggaccgaaaagcattttagaacttggaacagcaatcggttattctagtattcgtatgatgcaagctattccaaattcacgtattgtgacagttgagcgcaatcgtgagcgatatgaaaaagcacttgaatatatagaacgttccccagtaacagatcgtatttcagttatttacggtgatgcgttagagacaggtgaacaagtaaaagaacacgggacatttgacgttatttttattgatgcagcaaaaggacagtatcgtcgcttttttgacttatatgaaccgttattaaatcctggtggcgtaattatttcagataatgttatgtaccacggtcttgtaacgacaaaagagaaaattgaaaacagacgtacacgtggtttaatccgtcgtattaagacgtacaatgagtggcttatgaaccatgaaggatatgatacaacgattttcccaattggtgatggagtagctgttagtaaaaagagagggtgaccaaggtatgaagaaacctgaattgttagtaacgccaagagcggtggcggatatcgaacaacttgcgaaagcaggagcagatgcggtaatgatcggtgagcaaaagtttggtttacgtttagcaggggagttttcacgtgaagatgtaaaacaagctgtgaagattgcacatgaaaatggtgtgaaagtatacgtagccatgaacgctatgttccacaacgataaagtagaagaattaacagattacgtttcatttttaaacgaagtaaatgtagatgcaattgttttcggagatccagcggtattaatggctgttcgtgaagtagcaccaaatatgcagttgcactggaatacagaaacgacagcaacaaactggttcacttgtaattactggggacaaagaggatcaaagcgtgctgtattagctcgtgagcttagcttagatgaaattgttgatttaaaagaaaatgctgaagtggaactggaagtacaaattcacggtatgacttgtatgttccaatcgaagcgttcattagtaggaaactactttgagtatcaaggacgtaatcttgacattgaaaagaaaaaatatgaagagaatatgttcttatatgacccagagcgtaacaataaatatccaatttatgaagatgaaaatggtactcacattatgagtccgaacgacatttgtttcatcgatgaattagaggaactaatcgatgctgaagttgatagcttaaaaatcgacggtgtactaaaaagctctgaatacattattgaagtaacgaagaaatatcgtcaagcgattgatttatgcgtagaagatcgtgatgcatattatgacgtgaaagatgatctatataaagaaatagaagaaatgcaaccagtaaatcgtccgttagatacaggattcttctttaaagaaacggtttactaaacgaggagggtgtaggaaatgactgtacaagaaatttcacgagtgatcgatggcaaacgtgttattgtgaagaaacctgaactgttaatccctgcgggtaacttagaaaaattaaaagtagctatccattacggggcagatgctgtatatttaggtggacaagaatttggtcttcgttcgaatgcaggtaactttacgctagaagaaatggcagaaggcgttgagtttgcaaagaagtatggagcgaaaatatacgtaacaacaaatatctttgcacataatgaaaatatggacgggctagaggaatatttaaaagggattgaaaaagctggcgtaacgggaattatcgttgctgatccgcttatcattgagacttgtaaacgcgtagcgccttctgttgaggtgcatttaagcacacagcaatcactatccaactggaaagcagcacagtattggaaagaagaaggtttacatcgtcttgtattagctcgtgaagcaagctatgaagaaatgaaagaaattaaagaaaaagtggatattgaaattgaagcgttcgtccatggtgcaatgtgtatcgcatattcaggaagatgtacattaagtaaccatatgacagcgcgtgattctaatcgtggtggttgttgccaatcttgccgctgggattatgatttagttcaaacagtatcacaacataaagatgcaaaagagcttcctctattccaagaaggagatgctcactttgcgatgagtccaaaagatttaaatttaattttatcaattccaaaaatgattgaaatcggaatcgatagcttaaaggtagaaggacgtatgaaatcaatccattacgtagcgactgtagcaactgtatatcgtaaagtaattgatgcgtattgtgcggatccagataactttgagtttaaacaagaatggttagatgagcttgataaatgtgcaaatcgtgatacagctcctgccttctttgaaggggttccaggacatcaagagcaaatgtttggaaatcatagtaagaaaacaacgtatgattttgctggtttagtgttagattataatgaagaaacgggcatcgtaacgattgagcaacgtaatcatttcaaaccaggacatgaagtggagttctttggaccagaaatagaaaactttacgcaaacggtggagaaaatttgggatgaggatggaaacgaattagatgcagcgagacatccgttgcaaatcgtgaaattcaaagtggatcaacgagtgtatgtgaataatatgatgcgcaaaagcatacttcaataagaaagagtgatagtcgaatggggacgaataagcctgttgtaattggaattgctggtggttcgggatcaggtaaaacgagtgtaacgaaagcgatttttgaccattttaaaggtcattctattttaatcttagagcaagattattattacaaagatcaaagccatttaccaatggaagagcgtttaaaaacaaattatgatcatccgcttgcgtttgataatgatctgttaattgaacatttgcagcagttgcttgcatatgagcaaattgataagcctgtatatgactatacattgcatacgcgttcagaagaaattattccggttgagccgaaagatgtaattattttagaaggaattcttattttagaagacccacgtctttgcgagttaatggacattaaattattcgttgatacggatgctgaccttcgtattctgcgccgcatgcaacgtgatattaaagagcgcggtcgtacgatggattcagttattgatcagtacgtaaatgttgtacgtccaatgcacaatcaatttattgagccttctaagaaatttgcggatattattatccctgaaggtggacaaaaccacgttgcaattgatattatggtgacaaaaattgcaacaattcttgaacaaaaagtaaatttgtaatagcatagtaaaagatatacggtaggaagggattttttcccttcttatcgaatacaatgaaacatgcaacctcatctatatataggtgagggcatatttatatcaactttccatacatatcttctttatataaagaagaattggaaatacggggttgtatgtgacaactccgctagtgcaagggtactagaaacctccgctaacaatggaagcggaggagttttcatatggaactcctcttttttttcgggggattggtatataaaaggagtggaaaatatgtcaacagaaaaaacataccctatgacgcaagagggtaagcaaaaactagagaacgaacttgagcaattaaaaacagtaagacgtaaagaagtagtagaacgtattaaaatcgcacgtagcttcggggatctttctgagaactctgagtacgatgcagcgaaagatgagcaagcgttcgtagaaggacgtattacacaattagaaaatatgattcgtaacgcagttatcattaaagatactggcgaagtatctactgttgttacattaggtaaaacagtaacatttaaagaattaccaaacggagatgaagaagcgtatacaatcgtaggtagcgcggaagctgatccattcgaaggaagaatttctaacgattctccaatcgcaaaaagcttattaggtaagcaaattggtgagaaagtaacaatccaaacaccaggcggagaaatgcaagtagagattgtctctgtaaaataaaaaaagattctcctatcgggagaatctttttttctgtcgaatgaaaaaaattgtgtaaaccttagagtgattcgacaaaaaatgtcaaaaaaacactttaagctttgatatcataattagagaccataggttttaaaagggaaaaggggctaattatgaaacataaaatctttacaggattggtttgtagtatctccatattaggacttgctgcatgcggaacgaatgaagaaactacatcatcaaagggagaaaaagtgaagcaagaagaaaaaaaggatattaaagcaactgagagttcaaaagccttagaaaatccacaagataaaaaggaatttaatgattttgatgtagcgtatcaattagcaattgtcatgaaaatatttcaagatgtaacgattaagtatgattacgcaattgggaatccagattatttattgcgagattcgatggatcaaaaaacaatagatgatatgaagaatatgttacaagaacaggcgaagaataatgataaaattttaaaagatgaagtgaatcaagcatatacatatttaaaacaatcgaaagtaagtaataaagatgatattcaaaaaataatagatgcacaaaataattatttacatattgtagataagatgattacttgtattgattctgtaacagttgagaatgcaaaagaaaaaagaaatgaaatggataatcttagtaaggattatttaaaaatagcggctaatgtaacaaccactgtaattgaagttgctaaaaacactggagtgaatgaaactgaatttagatcgcttcttatgaaatttttagagaagccaaagaaacaataatagccttatataatatctgtttttgttttggagattgtataaataaaatagtacctcgtctaaactacaatagacgaggtgttttttatgaaaataaaacggagaattacaattgttttaatttgttttatgagcgttatgtttgtattgctttgtcgtttaatccaaattcaaattatagatacagaatcatttactgatcgcaaaataaatttaattgaaaaaagtgttacgcaacgcacacaatccattacagtagacgatggacgtgggcagtttatagatcgtaatggtaaaaaaataggtgaggaaaaatatcctgttttaattatttttccatttttacaaataaaaaatgacatgttagagaaaatcgcgcatatcattggtgtgtcgagacaagagattagaagacaaatgaaaaataataaaaatgcatttacactacaaggagaaactgctccatttcgagtgacacgagagcagatggagaaggtaaatgaattacatgtattaggtattgtagcagctgaagtgcgattaaaacaaactggagagataaatcatttaattggtgatgtaggggagaacgaaagggagtttcaaaagcgatatggagaattgaaaagaatctcaaaacaaacgccgataggtatttcaggattacagcaatcatttgatgaatttctattgactgatggagaggcaaaagtattatatcaagtagatcggcaaggagaaccaattttcggaaagcaagcgaaatacacttcaccaggaaatccattttatccagttaggattcaaactactttacataaagagttgcagcaaaaagcagaagaagtgattgaagcgaatgaaataaagaaggggggactagtattacttgatgtaaagacaaatgaaatattagcgatggctagtaagccgtctttacaagtaagggatgagaatttatataaaactacacttgaaaatcaaatgttaacgccacattttccaggctctgtttttaaaacagtagttgcagctgcagtcattgatcaaaaagtaaatttgtttaatcggacatttaactgtaataaagatttatatggtgaaaacgacccgcaagttaggatgggtacacttaactttaaagagagctttgctaggagctgtaacaggacattttccgagttaggtaacgagctattacaaaaggataagacggtgctagaaacatacgtagcagctttaggagcaaatgaaaaggttggatggaaaggttctgtatttcatacacctcattttgagcaaatgccagaagaaaagggtactactatttgggggaatgaagaaaataaaaatagtaaaaaagcggtagaacaaacagcaattggacagaaagatgtacgtatatcacctctagcaattgcaaatatgatggcgacgattgcgaggaatggagaaaagatggaagtgaaagcagttgaaaaaatagtatataaaaatggagcggatttttttacatttgagagccatacgttaaatggaaaacagctttcgtatgaaacagtgaaaacattacaagagttattaagaggcgttgtaacaagggagaaaggaacaggaacggcattccgttcgttgccactaagtgtcgctggaaaatccgggacagcgcaaacagggaaagggacgagggtgaatcgctggtttgcaggttattttccgtatgagaatccaagatatgctttagttgttgttgatctagagactgatagcaaagtgaataaagttacacctatttttaaagatatggtaggagcaatctatcaattggagaatgaaaagtaatcttgcaatttatagtgaaatgtcttcatttcatgaaaatatcattgtaaatgttcaacctttctagatttaatgttacaatagcaattaggaaaaactgcatggaggtttggagaatggcaggaggatcaagattccaacagaaacaacaaaaacgtcgtcaaaacggtgttttaaatattgcaatcgctattgtattactattagtagctattgtagcatatcaattgttcgttcctagtacgaaagagcaagcatcttctactgataagaaagtctctcaacaaacaacaaagaatgagaaagctggaaaatcagaagataaagaatctgctaagaaaaaagaaaaagaacaagagcaagcagaagctaagaaaaaagctgaagaagagaagctaaaggctgaagaagaacagaaaaaagctgaagaagaagcgaaagctaacgagaaagtatcagctgagaaaactgtatctaaggcaaaagaggcgtatacaaaaccttcttggaaagctgtaggaacagaacaaggttcatcaccagcgatgacgtttaaacagggttcatcagattggaatgagatgcaaagtgcaattgctgcaggtgttgaagtaccgaaagagcaattagtattccattttgttggaagagacaaaactggaaagagcaaagcttatggtgatgttcaagataagcaaagtgggaaaagatattatgtaaatattgattgggtagacaatgagggctggaaaccagtacttgttcaaactctaaactaaaaaagagaggctccttaggagcttctcttttttgttaacgcaatttctttaatttaaaatgaacaaccgcgctataatacggtcttttgctttcaggatccataaccatttgatgtgagatgtgatgaacttcaagcataagtgctttattattatcaatttgttcactaatttttcgttctaaagaagctaagtctcccgcttcaaaaaactctactttatcttctaacatttcaaaggtaaatgacatgaagacggcccctctcctatgtaatcaactatagtgtaacaaagaaaagaaggaaataccatgtacatttcaattgacatttttagaaagagggaatatcatactgataaaaccgataagaaaaaggggaatttttatgggtacagaatttaatggtttatttgatgagtgggctcatacgtacgactcatttgtacaaggcgaagatatacaatataaagaagttttcgcccattatgaggacattctagaggatgtagttaacaagtcatttggtaatgtattagaatttggtgtcggtacaggtaatttaacaaataaattattacttgctggccgcacagtttacggtatagaaccgtcgcgtgaaatgcgcatgattgcaaaagagaaattgccaaaagaattttcaattacagacggtgattttctttcgtttgaagttccaaattcaattgataccattgtaagcacctatgcatttcatcatttaacagatgatgaaaaaaatgtagcgattgcgaagtatagtcaattgctaaacaaaggtggtaaaatagtgtttgctgatacgatatttgcagatcaagatgcatatgataaaactgttgaaacagcaaaacaaagaggtttccaccagttagcaaacgatttgcaaacggaatactatacacgtattccagttatgcagactatttttgaaaacaatggcttccatgtaacgttcacgagattaaatcatttcgtttgggtaatggaggcaactaagcaatagaaagagggattagattgagaattgctgtaattggagcaatggaagaagaagtacgtattttacgtgacaaattagaacaagcagagacagaaacggttgcaggttgtgaatttacgaaagggctattagcagggcatgaagtaatcttgttaaagtctggtattggtaaagtaaacgcagcgatgtcaacgacaattttattagaaaaatataagcctgaaaaagtaattaatactggttcagctggtggattccatcattctctaaacgttggtgatgtagttatttccactgaagttcgtcaccatgacgtagatgtaacaacatttaactatgaatatggtcaagtaccaggaatgccgcctggatttaaagctgatgaggcgttagttgcattagctgagaaatgtatgcaggctgaagaaaatattcaagttgtaaaaggtatgattgcaacaggtgattcatttatgagtgattcgaaccgcgttgcagccatccgtgataaatttgaaaatctttatgcggtagaaatggaagcagcagctgttgcacaagtatgccaccaatatgaaattccgtttgttatcattcgcgcactttctgatattgctggtaaagaatcaaatgtttcatttgatcagtttttagatcaagcagctcttcattctacaaactttatcgtaaaagtgttagaagagttaaagtaatgtaacaaaaaggcaactgtctcatataaagaaaatacatacagttgccttttctttattggcaaacaagggggagaacacgatgaatgtatatcgtggagttcatgagttaattggtcatacaccaattgtagaaattactcgtttttcacttccgaaaggagtccgtttatttgcaaagcttgaattttataacccaggcggaagcgttaaggatcgtttaggaagagaattaatcgaagatgcgctagaaaaagggcttgtgacccagggtggaacaattattgaaccgactgctgggaatactggtattggactggcacttgcagcattagaacatgatttacgtgttattgtttgtgtaccagagaaatttagtattgaaaaacaagaattaatgaaagcactaggtgcaacggtcgtgcatacaccgactgagcaaggaatgaccggtgcaattgctaaagcaaaagagttagtaaatgaactaccgaattcatactctccaagtcagttcgcaaatgaggcaaatcctcgtgcatattttaaaacactaggacctgaactgtgggacgcattgaatggagagattaacatatttgttgctggagcaggaactggcggtacgtttatggggactgcatcttatttgaaagaaaaaaatatagatattaaaacagttatcgtagagccagaaggatctattttaaatggtggtaaggctggttcacatgagaccgaaggaattggactggaatttatcccgccatttttgaagacatcttattttgatgaaattcatacgatttctgatcgaaatgcatttttacgagtgaaagaattagcgaaaaaagaaggacttctcgttgggagctcttcaggagcagcatttcatgcgagcttacttgaggccgagaaggcagcaccaggtacaaatattgtaacgatttttcctgatagcagtgagcgctatttaagtaaagacatatacaaaggatgggaataaaaaatgagagcaaagacaaagttaattcatggtattcgcataggagaaccttcaactggatctgtaaacgtaccgatttatcaaacaagtacgtacaaacaagaagcagttggtaagcatcaaggatatgaatattcacgtacaggtaacccaacacgtgcagctttagaagaaatgattgctgtattagaaaatgggcatgctggatttgcatttggttcaggaatggctgctattacagcgacaattatgttgttctcaaaaggtgaccacgttattttaacagatgatgtttatggcggaacataccgcgttattacgaaagtattaaaccgtttcggtattgagcatacatttgtagatacaacaaacttagaggaagttgaagaagcgattcgtccaaatacgaaagcaatttatgtggaaacaccaacgaacccactactaaaaattactgatattaagaaaatatctactcttgctaaagagaaagacctattaacaattattgataacacattcatgacgccatattggcagtcgccgatttctttaggagcagatattgtgcttcatagtgcaacgaaatatttaggaggtcatagtgatgtagttgcaggtttagtagttgtaaatagcccacaactagcagaagatcttcactttgtacaaaactcaacaggaggtattcttgggccacaagatagcttcttactacttcgcggtttaaaaacattaggaattcgtatggaagaacatgaaacgaattcacgtgctattgctgagttcttaaataatcatccaaaagtaaataaagtatattacccaggtcttgaatcacatcaaaatcacgaattagcaacagaacaagcaaacgggtttggtgctattatctcatttgatgtagatagtgaagaaacattaaataaagtacttgagaaactacaatactttacacttgctgaaagcttaggagcggtagaaagtttaatttctattccatctcaaatgacacatgcatcaatcccggctgatcgccgcaaagaattaggaattacagatacattatttcgtatttctgtcggtattgaagatggtgaagatttaattgaagatttagcacaagcgctagcataataaaaaatgcactgctctatattagcagtgcgtttttttattacgtctattttgtgaaacatttcacaaaatagacatacacaaacgaaatgatttcatgtatattgaattcaggaaacgttactcacgaacaaacttgtgaaacttttcacaaacaatgaaattcatgtaggaaagcatctctatttttttgtgttaattgggacttattttgacctacagggacatataaggaccgtaatagtagaataggaggaaattcacatggtagtcaaagagaaagttgtaaatgaaatgcaggaagtaaaaaagatgattgatacgctagtaaataatggtcaacaagctttacaagcattagaaagttttacacaagaggaaattgacaacattgttcatgaaatggcattagcaggtgttgatcaacatatgccgctagcgaaattggcagttgaagaaactggccgtggtgtatatgaagacaaatgcattaaaaatatttttgccactgaatatatttggcatagtataaagcaagataaaacggtagggattattcacgaagatcctcatgaagaaataatagaaatcgcggaacctgtcggtgtagtagctggagtaacaccagtaacgaatccaacgtcgacaacaatgtttaaagcgttaattgcgataaaaacaagaaatccaattattttcgcatttcatccttccgcacaaaaatgttctgtggcagcagcgaaaaccgtatatgatgcagcgatgaaagctggtgcaccaaaacactgtattcaatggattgaaagaccgtctgttgaagcgacgaaacaattgatgaaccatgatggtgtagcactcgttctagcaactggaggcgctggtatggtgaaatcagcttactctactggaaaaccagcgttaggcgttggtcctggtaatgtaccgtgttatatagaaaaatcagcacatgtaaaacgagctgttaatgatttaattttatcaaaaacatttgataacggtatgatttgtgcatcggaacaagcaatcattgtcgataaagaaatttatgatgatgttaaaacagaaatgattgaaaacagttgttactttgtaacagaagaagaaagaaaaaaattagaaaagctcgttataaatgaaaatacatgtgcagtaaatagtgatattgtagggaaatccgcacagtatattgccgatttagttgggatcactgttcctggacatacaaaaatgcttgtagctgaaattcaaggtatcggagcagcatatccgttatcccgtgagaaactgagtccagtattagcttgtgtgaaggcaaattcattagaagaaggatttacatattgcgaagaaatgttgaacctcggtggtttaggacattcagcagttatccattctacaaataaagatgtgcaaaagcaatttgggttacgtatgaaagcttgccgtctcattgtaaatgcaccttcatcacaaggtggaataggggatatatataatggatttattccatcacttacacttggttgtggttcatacggaaagaattcagtttcccaaaatgtaacagcgactcatttattaaatataaaaaggctggcaaatagaaaaaagaatatgcagtggttcaaactgccaccaaaaatttattttgaaaaacatgctacagcttatttagcaaatatgcctaacatttcacgtgcatttattgtaacggactccggaatggttgaacatggctatgtcgatacagtcgcgcactatttaaacaagaatgcaaatgatgtgaaagttgaagttttctttgaggtcgaaccagatccatcagatgaaactgttttcaaaggtgcggaaatgatgaaaagctttaagccagatgtaattatcgcacttggtggtggttcagctatggatgcagcaaaaggaatgtggttattctatgagcatccagaaacgacattctatggtattaaacagaaatttttagatataagaaaacgtacatgtaaatatccggaattaggaaataaggcgcagtttgttgcgattccaacgacatcaggaacgggatcagaagtgacaccatttgcggttattacagataagaaaaataatataaagtatccgctcgcagattatgaattaacaccagatgtagcaattgttgatccacaatttgtaatgacagtaccaccacatgtaacagcagatactggtatggatgttttaacacatgcaattgaggcgtatgtgtctgttatggcaaatgactatacagatggattagcattaaaagctattgatctcgtattcaaatatttaccgagagcatataaagatggaaatgatgaagaagcaagagaaaaaatgcataacgcttctgcaattgcagggatggcatttgcaaatgctttcctcggtattaatcacagcttagcacataagattggaccagaattccatattccgcacggacgcgcaaatgccattctaatgccgcacgtagtccgctataatgctattaagccaagaaaacacgcattgttcccaaaatatgagcactttgtggcagatgaaagatatgcacatatagcgagaatgctcgggcttccagcaagttcggcagcagaaggggtggaatcactcgtccgagcaattattgagcttggaaaaagcttaaatattaatatgagtattgcgggacaaggagtcgataaagagcaatttgaagaggttgttggagtattagcagaaagagcttttgaagatcaatgtacaactgctaatccaaagttaccgcttatttcagagctgaaagaaatttatatggaagcatataaaggtgaataatgataaaaaaagagccgcagtaaaagcggctctttttttattggaaaacatctcccagaatggctgtatttactggtctttcagtttcatagaatatgatacagtgaaatggaggagtgagaatataatgaaagaattaaaaggaaaaatagaagattatactcggtttggacaaatgcttctcgctgtaagtacattgttaatggttggcttattgattccgagtggagcaaaagagacaatccaattttttgttatgatggggagcatcgttatatttttaagcttatcgttctttttctttcagcgtgtgaaagtgatgcgtgaccagctagaggaaaatgaatgtgaataatattgttaactagagcgcagcgaaaagaaaaaatctttttgtcgcgctttttgttttttgtaggaaaatatatgtgtttcgtgttgacaatgataatccttatcaattaaagtataatagtagttaatgattatcattatcgattagaggtgaagaaatgaagaaatctattacgctatttacagcgattttatccatttttttcttgttaataggttgcagtgccaaaggggacgaaaaagcgtctgcaaccaaaacagaaaaaggaaaagagaaaatcgaaattaccgacctatcaggaagaaaggtaacattcgataaagtgccagaaagttttgcaacattaagtatgggggacatggatattattcatgctttaggtggaaaaatagtaggtcgcccggatacgaaattaactcttccagaggagttaaagaaagcacaagtaattgggaatgcacatcaaccgaattttgagcaaattgctagtttgaagcccgatgtacttgttgctaacaatggattccaaaagaatgtgccaacggttgaaggacaaggaacgcaagttatcatttcttctgcgaattctgtacaagatattcaaaagaatattgaattatatggaacggtaatgaagaaagaagataaagcaaaagaaattaatcaaaaaatgaatgatcaaatgaagaaatatgagaaaaaaagtgatgtgaaagcattgctagtgtatggcgcaccaggaacttatttagcggcattaccaacatctttatcaggtgatattttagaaaaaacaggcggaaaaaatattgcttctgattttccagaaacgaaagaatatccgcaatatgcacagctaagtgtagaacgtattattgaggcgaatccagatgtcatttatttaattacacacggagatccaaaaagtgtgaaaaaagcatttgaaggcgaaatgatgaaaaatgaagcgtggaaaaatttagaggcagtaaaacaaaaccgcgtagttattttgccacctgatttatttggatctaatcctggtacaaaagttacagaagcaatggactttatgtataaaagtatacaagatgtaaggaaatgatacgtatggaaagtagtgaagtagtaagagaaaaggaacatccttttgcgaaaaaaagatggataatagcagttactttagttgtattaacaatcctaggtctcttttacggtctcttcgcaggaagtttatccttttctgtacgagatattttaacaggtatacaagaggaaggttcgacagttcatcgaattgtatgggatcttcgcataccgagagtgctcattgggtttatagtaggaacatgtttagctgcatctggtacactgctacaaggggttatgagaaaccctcttgcagatcctggtattatcggagtttcatctggggcaggccttgtagcaattgtcatcatgattttattcccacagcatctagcttttttaccactaggggcgtttttaggagctttcataacagcaatggttatttatgctttatcatggcaaaaaggggcatcaccttcaagaatcgtcttagtaggggtgtcgatcaatgcattaattggtgcagcaacgtcagcattaatgttattacatagtgacaaagtacaatcggtgttaccgtggctagcgggcggtattggtggtgtaagttgggcacatttaaacatgattatttattatgcaatattcgccattatattagctttctttggtattaagcatattcgagtgttaatgcttggagatgaaatggcaaagttattaggacataacgtggaaaaaagtcggttttatttaatcgtagtaagtacattattagctggaattgcagtaagtgtgtctggtcttattggatttgtcggtcttgtcgtaccacatatgctacgtttattagttggaaatgattatagatatttgctacctttatcatgccttggcggcggggtattacttgtttttgcggatgcaatagctcgaagttggtttgacccaatcgaattgcctgttggtattttactgtccttcttaggtggtccgttcttcttatatttaattcatagaggaggaaaacaaagtgatttccgttaacaaagtgttttacgcacactctgaaagatttcaaatgcaaaatatgaatgtacatattaaggttggagaaatcgttagtttaattggtccgaatggatcgggaaaatctactttgcttcgtttaatagcaaggctactgaaacaaagcgaaggggacatcattttagatgggaaaaatattcatatgatgaagagtgctgatgtagcgaagcaattagcaatgttaccacaaatgcatgatcatcaattagatttaacagtgaaagaactaattgagttcggaagaggtccacataaatcatggagtagccacttaaataaagaagatgaagaaattgttgattgggcattgtctgttacaaatcttgaagggtatgaatatcgtcttttacattctttatcaggaggggaacggcaacgtgcttggattgcgatgacgctagcgcaacgtacaaatgtcttattattggatgaaccaacaacctttttagatatcgttcaccagttggaagtaatggaacttgttaaacgattaaatgaggagtttggaatgacaattataatggttttgcatgacattaaccaagctgctcaatatagcgatcgtttacttgtattaaagcgaggaaaaattcagtatgatggtataccagaagaagtactatgccatgaaatgtttcaacatgtgtttggcatagatgtagatatttttcagggaagtgacaagcctttttttacaccgaaacgaatttctaaaaggggagaagagcgatgcaagcagaagagcgtattaccattgaattagtaagagaatttgttatggcagctcacggggatttagagaaagtacaagagctattggttgaatcaccaagcttacttcacgcctcttataattggggtggatcagattgggaaagtgcgttaggcgcatcggcacatgtaggtcgtaaagatattgctctttatttactagaaaagggtgctcggatggatatttttgcagcagctatgcttggtgaattagaagttgtacaagctattttagtagctcaaccagaagcattgcgtgcatctggtcctcatggtatttctcttcttcaacatgcacgaatgggtggagagaaatctaagcgtgtatatgattatttagcaatactatcttaatgaacggaagaagttcttatgtgcggtaaacttttcacttgaaacaattggaaagtttaccgcccgttagaacgggataagtatctagtatatttgaaaatcctacacccccctcaattgtagttttctttatgctagttatgatatggatgcagtggacaatatttgtctactgctttttttgtttctataagattgaatattctgtgttatgtagttgattcatttataataaatggtaacatttattgtgcatacaaaatatgatcgtgaaattaagaataaattagtggaaaggagtgaaggaatgtttcatacagaccgtttacaaattcgtaaatatacaatggatgatttacagttctacgcttcactatggggaaacgaaaaagtaatgcgctatattggaaacgggaagttaaaaacatatatgcaatgtaaaaaaagtttggaggagtgggtaattcctagctataaaaacggcctcggtttatttgtattaattgaaaaggaaacgggaatacggattggtcatgcaggattagtaaagcagcagatagatggaaaagaggaaattgaaattggttattggttattacctcagtattggggaaaaggctatgcgaaagaagcagcggcagcatttcgagactatggcttccaagcgttaagaatgaataaattgatttctcttattaatccggatcaccccgcctcaatctttgttgctagaaaaacggggcttagttatgagaaaacaacttcatttcatgggatggatgttctcgtttattccattaggcgcgttggatgaaaaaaggttaattgcattttttgaagaatggtatataaaaataaaggggggattacatgtacatttatcataatggacttattattcgtgagggaacgaatggtgtacctgcatatgcaattaagactttatttgaagatgccggttggagcaatgataatatcccttcttggcaaattgaaaaattcacgatagcatttgaaaattcaacatgggcattcacaatttgggatgaagaagagatgattgccatggttagagtcgtttctgatggaatcatggtcgcgaacatagtaaatttagttgtgaaatgtgaatatagagggaagggattaggtaagaaacttgtcgctctttgcttgcaaaagctaccacatggtgactggtttgcacatacttctgcgaacaattttgatttttatagaagctgtggatttgaagttagagagctatcgagaaatggaacatgtgcgtattatggatatcaagtcgcgaaaagagatggtcaccgataaatgaatgaaaagtaaaagtttagcgaggtaattttgaggatttgataatagagaatggattgaggcacattttatgataaaataaaagaaaattctgtttattattagggggataaaaatgagtataaaagttggggatgtatttaaatatgaaagaagatttactgaggaagaggtgtttgaatttgcaaatattaccggagataaaggtagacaccatgtggaatatgatgaaaatggaagattaatggtccatggtttattgactgctagcattggaacgaaagtaggcgaagaattacattacatagcaagagaattagtaagtgagtttattagaccagttttcacaggagatacgatcacttgtgaattaactttaacaaatgttgagcaaatggaaggctataaaaaagtttcaatcgagtcagtttatcgcaatcaacacgaaaagactgtactagtggggacaagttatggaattataaggggataaaaaagaagcctgtttagcaggcttcttttttattatttagtaaacacgttttcgattttccgcataactagagatgagtagtaatgcagtttcttctcctatattacgaacaatatgaggaacgcatgcattccatgagaaagaatcaccttcttctacaattgcaatatcttcaccgtgctgaacttctagttttccgcgtaatacaaggtgacattcttccccttcatgggcatttggtgagttttctttcgggaatccagtagggatttctactaaagataggcgaaggcccccttgctccgcaacatgttcaattctttgctcatctttgccgtatacactgtatttccgttcttcttttttgacaatttttaatcgatctttttgctctaacaataaatagggaaggggaacgtttaaaaaattggagatcgtttctaaagttgagatagatggtgatgttttattattttcaacctgactcataaatcctttagaaagacctgttccctcacaaatttgtgcgattgttatgcccctacgttgacgaatttcacgtattgcagaaccaatattcataaaatcaagctcctttttgtaaacaactatttgtatcatagcaaaaaaaatatattttttcccagtgaaaatgaattgacgaataaaaaaaattagtgtatgttttgtaatgtaaataaaagttttgtataagaaaactataaaggagagaaagaaatgaatcaacatattggtaacttaattattcgtatcgtgttaggggtaacattcttcatgcacggtttaacaaaattccaatcaggaattgacaatattgcagggtggtttacaagcattggtttaccaggaggacttgcatacggtgtagcaacatttgaattagttggaggcctattattaattctaggtttaggtgtaagatatattggattattatttgcacttgttatggttggagcaatcgtaaaagtgaaatggtcagctggtttattgggagatggaaaaaatcctggtttcgaattagaacttgcattattagcaatgggtgcatacttatttgttgcaaaagctgatggttttgtagataatttcttaaaagaaaaaatgtcaaagaagaactaatttaaatggggggctaacaagatgagttttcaacttcatcccgatacaacactggatgttgttcatttatacgtatctaatgtaaagaaatcactagagttttatacggaagtactaagtatgaaggtgctaaaagaagaaaaagcagtcgttacatttgggaatgaaaatgatgaaccacttcttatcattgaagaaaagaaagaagcttttccgaagcaaagaggaagaacagggttatatcattacgcaattttattaccaagtaggcaggatttagcgaatgttcttcgtcatcttgtagaaatggtatatccactacatggtggggccgatcattactttagtgaagctctttatttagctgatccagatggaaacgggattgaaatttatcatgatcgacaaaaagaagtttggcgtgatgagaatggagagctcccatttgttagtaacccgttagctggtgaagaattattgcagcaaggaagtacatggagtggatttccagctggtactgtgatggggcatattcatttccatgtagctgatttagaggaagcgaaacgtttctatgttgatggtcttggttttgaagtaacaatcccagctcgtaatggagcgttgttcgtatcagcaggtggctatcatcaccatatcggtttaaatacatggcaaggtgaaggggtaccaccgcaaatgccaggttctgttggtttgaaatatttcacaattgtattagcggatgaaaaacaaaaagagcaagtatgtgaaagcttaaaaaatattggtaagattgctacgtacaaagatggaatattacaagtcgaggatccatttggacattgtatccatttccaaataaaaagagaagcctaaaaaggcttctcttttttattttcttataattgcattttcgttttgtaaaaatagttcatcaaattgttttgcaagctcaaaatctagtttcgttaaaccttttgcattccaagatgacaaagtaataataactgctttatactggataaggataaatggatggtgattatgttcttctgatagtttggcggcttcagagacaaattcgactccttttaagtagtcggaaaacatatattttcgttcaatccatttctcatcttttaccatccatttatctaccttcaataattcctcgtgaacttcttcttcagttaatcttagcatcatttttcacatcctttattggaagtaacgcaagaccattgttaataaggcgtgttacagcttcgtcagttgtgaaagtagaaagttgatgtagtaatgctgcagatgtttcatgccctttgttatgctctaaaagtaactctaatacttcaaggcgcagcaaccattctttcgcataaaatttatttaatacttcttgaattgctactaattgatcgatatgcgcgtcgtgtaaaatcccctcacttcgaatatctcgaactgtttgatacatacgctcgagttcattcagtacaagcggagcaggaatttcttgaacttcttcatccattgggaaaaatgctgctgcatctgcggcacctgggaatactgaagtgatttgtgagccaacagccatatcaaatgcgccccatgaagcatcaaataaaacgcgggcgttataagtaactgtgcaatcgataaaggaaataagagcaattttcttatcatttttcacaatatctgttactgttccttttacatgaataccacttgcaaaagtaaactcagcgatagttccaattttaattcctaatgattgtagttgttcgtctgtacaattttctaatgcaatattttcagtaagtaatccaatcggtgttccaaatccgtcactgtgtacagaagtagaatgattcgctaactgtttattatgaagcgctaatgccgttggcgaatttgttcgcatgtaaattaattcacctgcatcgttttcaattgtctcgctaaatgtacctgtgatttgtaatccactatttagctcagctgttgcatagttctcagagcgaattgctttttctaaaccttcttttccacctgttttaaaggccatcgttttagaaaatgtttcaagcgcatctgttaattcttcaaaggattcacaaacaaatagttgtggttgcatttttgttacgtcataagttgtccctgtacatgcttcgatagaaaatggaaccttttctacagcgtctgttaagcaatgtttgctttcgccaacagaagaaaggagaccagcaccatatatctttggatcatctatatttccgatcaatccatattctactgtccaccagaaaagacgtgaaatttgttcagcttccgataaaccagaaactaagttttgtttttcaattacagcattttcagcagccttaacttcatcaggagtagaagtagggctttcttttactatcgttaatgtacgaacagcttcaaatgcatcatgttcttcttttgtagagaaagcttttgcaccaatttgcccaaaacgtttcacatattttgcatatgtaggatcaagtaaaatcggtgcgtgtcctgcggcttcatgtacgatatctggagctggtgtgtactcgatattttctactttccggatatctgttgcaatcggtagtaatccgtgtccttgaaaatcgaagaatgctacgccaggaataagtccgtcaattgttacagcgccccagccgcttggtgccaaacactcattcatttcttctacttttggaattgcatctatattaataccagatgattgtagtccgttcacataggctggatgagcaacgtcttttaagaagctatgattttgtctcataatgtaacgccacacagcgtgattcaccggtgtgtattgatcataatgttgtgtggatacaaatggttttaaatgcgatggaatttctgttttctttgtcatttagacatcctcctttttttcaataaaattgaatatcgatttcgtatagcttgtatcaccccctttcatttttttgtaagcgcttataaaattttatcataagattcggaattatttaacatatgtttctgtgataaatagaaaaagcccctatcggaaaatccgataggggcgaaagaatcgcggtaccaccctatttgtaagtgaaaatatacttacatctcaattaatgataacggaaaaattccgtcttttcctccatgcataaaagcattacgaaaaagaagctccagaattgtaattcatacttatatatgtgctaatttccaccgaccattagctctctgtaacagggatataagatactactgcgattctttcaacgcgtatatatgaaattgtgtaagaggatggatgcaaaaaagtccctatcggaaaatccgatagggacgataaaaatcgcggtaccaccctatttgtaaacaactaattgtttaccactcactttacgataacggaaagatccgtctttctcttcatgcataaaaagcattacgggaaagaagctccagaattgtaattcacgcttgtatatgtactgattcgcaccaaccatcagttctctgggacagtgatataagtcgctactagcattccttcaaagccgatatataattcgttaaactaaactatgttttgtattataaaactatattaaaaaaattgtcaacaaaaattttttatcccgtgttaatgagcagtaaaattcctacctcaaaattcggtgggagaataattgcccgtaacccccgattggtgaaggctaataatcagtggggatgaacaaaatctctactgattaaggtttcactttatttcacttctaaattaacagttaaattagaggtattgccagctgcatcagttgctacaatgtgaatagtatttttttcttcgtgtaattgagtgcgatcgaaataaatgtcatagcttttctcccaagggttcaggaatgcctgttcccatacaccatttccgttaatttcatattgcattctcactggaataccaggtgctttttttagctcagcatgataagactgagcattactattttgtaaatctggagcatgctgaatattactttgagcagcgagaggtgcatgttgcaattctacaattactgatatttcttttgttgttttcgtttcaacattttgagcaattttatgttctccccactgttcaatcgttgtttttaattgtggactaaattgcttctccttttgtagtgattcagcatgagcgcttaaagctccaaaactagaaaagacaagcgccatgcttaatagtgtagatgtagtttttttcattgatactccccctaataaaaagtgacaatattcagaaattaaatcttacattttagttataacttataaatataaatgttggctaaactatactttcaacataattcataccaatcctctatgaattgaaaatttcttgggaaattttttctgattatgtcgaatcgatatttttcacatattgtaggaagaaagtgaggaatgctatgagggaaatggagtgatggtatgaaaaggctaatagtaagtggtagtgtagtgttgtttatgtttttgtgttctatcactattactagcgcagaaaataatagtgtgaaagttgcttttattcgtcatcataacctttggattaaagttgaggggaaagaaaaacaacttacaaaaggagagaacataacagggccaaagtggtcacatgatggagaatggctggcatatgtaaaagggaagaaacaaaatattcttgagttatatcggctgaaagatggaaagaaagttacgccgtttcactcagaagcatcgaattatcaatggtcaccaacagaaaatataattgcatttatatttacaggtacattaaatacatttgatgtagaaaaaaagaatgcagattttgaaaatgtatcggctggtgtaggggattatgcatggtaccccgatggaaagaactttcttgtatcctctgaagcgcacttacttccaacaggatggacaggggctcagctatatgaagtgcaaaaagatgcacatatgaatcctcacaaaatgaagcatttgtatgcattgccaaatcaacatgatgatttcctagcgctagtagcaagtggctttaagtggtcaccagatcaaaagtggatttcatttttagcagtaccgacagcttcatggtcagctgatagtaatacgctttgcttagttcgtgcagatggcagtcggtttgaaaaagtagatcaaatgttactaaacgcacaatggtttcaatgggcaccatcaaaaaatatattagcttatattgaagggagcggaagagttgcattagaaaataagcatttaaaagtaaaggaattgccagcacttcagcagaacatatttacgccgaaaggatatgttgattgggattttgtatggaagaacgatagagtaattatcgtttcacgagcaaaggaggcagggatagaaactccaccagaaaaaaggccactaccatctttgtatgaggtcgatagtacaagtaatgcacagcatcaaatcacaaagaaaaagaacaagcaaggggattaccacccgatcttcatgaagaagagtaatcaattaatttggatacgttcagaccgtaagaaagcggatgtatggcttgctcataaagatgggaaacaggaaaagaagtggattgaaaatatagatgtaccagcgtggtattatgagaaatggaattgggaaaatgtcatctcggtgaaataacaataaaaaactgcctaaaagatcattttaggcagttttttattgttatttatgcgttttatttggcttttttttcgctgggtttccgttcccttggcgctttctattttgttcatcttttgcttgtttttcatgtagtgtatctaaaaattcattcgagtatataaatgctaacttaaatatgtacattaacgcttgaataaatatgtacattttcaattggattctccatactgactatgtctttttttagtaaataggcctttgataactaaaaattcttttgtttttcagttgacatactaccgcaggtcttattacctatttatgtatggagtgttcttatcattcatatagcaagtgaagcaaacaaaaaatagccgacttttatataaaagtcggctgctttcttataattcgagctctcccatacgaagaagctccacaactgcttgtgaacgtcctttaacccctagcttttgcattgcgtttgagatatggttgcgaactgtcttttcacttataaaaagttcacctgcaatttccttcgttgttttatcttgaaccagcaattcaaatacttctctctctctctttgtgagtaaaggtttagattgatacgctttttccttcaactggtataaccctccttgcttaagccagagctgtgtatgtgtaagttgggtgtttatttagtcaagatattgtatgaacgaaatgtgcaggtggtgaatgaaaatgggctttatttcctatgttattttagacttttatacagtgcgtacactctttttatccacttactttccaacgcgccatatttgttctagcaatatacttacaaccgtacctacaaataaaccattaccgaatatatattgcataacagacggcaaggattggagtgctccagacggtaaaaacataacgccgctgccaaataatactgcaacgcctaagatcgttacattcctttcactcatcggcacttgttttatattattaaatccaattccaattaactgtacgaacgaagccattaaaacagccgatgcgacagctgatggtaaagatgctaagtaacgaataatacttggaaaaagagacattacgactagtaacgcacatgccattaagaacgatcgtatatacttttgttttgttaaacgtatgaatcctgccgttgctggtaacggaacgacacctacagttgaaaatacagaagagatgagatgcgaaatccccccaacccatgttccatctttcaactgtttttgttcaatagtcgctttatgaatagttgcttgattaattgctataatagctgccaccgtattcgaaactaaaatacataccataacgaaacttgatacagccatacctgtattccattttggaagtccccaagcaaatatatgtggaagttgcacaaaatgagttacttgagatgggattgtcacttttcctgcaatgagaaaaataatccacccactaattaatcctattaaaactgcataacttttgacaaagccttttccaaaattagatagtataataacgaacagaaatatactaaacgcgatcattgctgtaaatccgtcgatttgagaaatagtagctgtaattcctaacattccttttaaaaatacaccacttaattgtaaacataataaaagtaaaaacgtccctgtcacaagcggcgtaaataaaaataaaatacgtcctataaaaccagttactcctaatcctattaaaataacaccggagattatcattcctaattctaaaatttgcagtgtactatgtaattgatcctgtccggccgttgcataagcaagtacggtaaatacaccaacccaagatccagccagcccatccgcaattggcagtctatgcccaagccacccttgtaaaaaagaagatataccaactacaaaaaacgtacgctgcattaaataaaatatttcttccgtcgtaagatgaaataatccgccaacgacaattggtagtgctattgaatttgctaataaaaatataaaccattgcaaagttcccataatatgattttggttatgttgattgtccaattttttcatcccttctagctttcctataaaaatatattgtaagaataaaaaagaagagttctatactcaccattagaaccctcctcaaaatatttaaacgattcttctacacaagattatttaattccacctcatttaaacttccaacaacaatatttcctttatacacgactaaacgtttttctgtttgacgcgctactgcttcagcagcgcatgtcgcattcgtcaaaacaaagctcgcttcatcccctacattcggccatactcgcttcccttcattatttaacgtttcttttccccctgtaataaagcggagtgcttttcctaaagacctttcgtcactccacccaaaacgctctgctaatcgattcgccttttgaagcatatcacctgttccaaacggtgaccaatgatctgtaatgctatcattgcctaatgcaaccttaacaccttttttatctaataacggaattgggattacttgtttaccaattggcactgttgaagtaatatcaatatttacatttgcgagtctttctgccacttcttcagcctctttaccagtaacaccaccaagtccaagtgcatgactaatcgttacacggccttgccatcctgcttcttctgttaaacttgccaatctcttcatcgtaaacgttccaagattattcgcatcgtgcaaatgaatatcaacatccgcattaaattctactgcgatatccataattgtatgtaatgacttttcaatgtcattatctactgtagctggatctactcctccgactagatgagcacccatacgcatcgcatctttcacgagttgcacagaatcactgcgcaataatccatgttgcggaaacgcaacaattctactagacactcgatttttatatgtttctaatgccgctaacgtcgcctccagattaccaagcccaataatcggatcgacattacaatgcgttctaatattcgttgcaccattttgcagtagtaactctagcatattttccgctctatttcgggcagtcgctaattgctttggtaaaattttttcttcttcattaaaacgtgtaaaaatactttctgctggcatacaagctttccatgggccactataatatgttttatcaatgtgaatgtgcatctctttgaaagctggcaacattaataagttcttagcatcaaaagttactatatcttcctcttgaacaatcccttttataatttttttaattcgaccatcttcaataagtaaactgcataattctgtttctgtttttgaaattctctcttcttcatatgtatatcctgattcaagcattacgttagccaaccaatatactgtcatctctatttccccaccctttattaaaaatcacctcataactacaattttaatatccactgaaaattaagacaattaatacgatcacttctcacaaaaaaatgtaatacaaccccatagtcttctcataaatttccatatagaataaaagtatgcagtttgatataaaaaggagttgattggaatatgtcaaaaaagttatgtaaatccgaaactgataaaatgctatttggtatatgtggtggtttaggagaatattttgatattagctctactcttattcgtatcatttgggttattgctgttttatgttttgggacaggatttttagtttatttcatttgtttattacttatgccacgttcgtactaacggcattatttcacatacttaagaagagcaaatcacctatagaatcctataggtgattttttcatgaagaatatttcatcgttaaatgtaataccgctacttcttcttcttcatttttataaatatgcttcttattcgcttcaaattgaatggaatcaaactcatttaattcgtatacatcattctccacttgaatagacactttccctttcattaccgttacaagctcaatcgcaccttcatgatgagcttctggctcatatatactatttgatcgtaaacaagcacggtgcatttccatccctgtttctttcgtataacggaacatcgtttctaaatgccacgcttgtccttcatctactgcaaatccttctccacagcgcgcaacagctacaggttctccaacaaccattaatctggataaaggaattgataaccctttcgttattttccaaatgacagctagtgtcggatttgtttcccctctttcgatctttcctaatgttaatttactaactcctgttttatgagctaattcttctaaacttaatttctgttcatttcgaatttgtctcaataactgtccaacttgttgaatgacttctttcgtttgcatatcttcattttctttcatatataaaaccaccttaaagtataaaatagtttacttttaataattaaaagtatatcatactatacataattatttattttcgaaaggagtgttatacttcatgcgcgcaattttattaggtcttttatcatcggcctttttttctgcaacctttattattaatagagcaatgaatgtatctggaacgagctgggcttggacagcttccttccgttttttatttgctcttcctattttattccttatcgttttatttcgcaaaaactttaggggattatgggaagagttaaaaaaacatccattggcatggatcggatggggttctgttgccggtattggtttttattctttattaagtttcgcagctgtcttttctccagcttggctcgttgctggaacttggcaagttacgattttagctggtttactactatcaccactatttttcgtgaaaatagaaacaaaatcaggtacgaaacttgtacgtggaaaaattccacttcgtagcttatatgttgcattatttattttacttggtgtaatttgtatgcaaacaactgccgcaggccatattacaatgactcagttcatttcaggttttttacctgtcgtattagccgctttcttatatccgttcggtaaccgaaaaatgatggagcttgttggtggacgccttgatacgttccaacgtgtattaggaatggcaattggaagtcttcctataacaatcttgcttggtatatacggattttctactactggcattccaacatccaaccaaatgcttcaaggatttctgttagcattatgttccggtgttattgcaacgatgacatttttctttgctactgacttagcaaaagataacctctctctacttggagctgttgaagcaacacaagctggaacgatggtctttaccgtgcttggtgaaatcattttcttaaatggttcactccctggaggactttctctcatcggaatgattattatcatgttaggaatggttgcaaatagtattttaaaccgttctgttccagtcgttaaacagaaaaaatcagcataaaaaaagagtatggttctatagagatgaaccatactcttttttattgtccccctatttcgccttatcagaatagtatttcattggctctttatactaaaacttatgttataatacgtttcatgcgcattaataggaggtaaattatgttaaaaaaagcaatcgctgaatttattggtacatttgtacttgtattattcggaactggagtagccgtcactggcggcggaattgaaggaattggaacattaggaatcgctatggctttcggtctatctattgtagctatggcatatagcatcggaacaatttctggatgtcacattaacccagcagtatcagtagctatgttcatcaacaaacgaatgaacgctatggaactttgttattatgtattagctcaaattttaggtggtttattaggaactgcaacgttagtaacaattttaaaatctgctaaaacacctttagataatttaggacaaaatggtttcggaactcttggtttatctggagcatttttagttgagttcattttaactttcgtatttattttagttatcgttgctgtaacaggtaaaaaaggaagttcttctttagctggactagtaattggtttcacattagttttaattcacttattaggaattccgttaactggaacatctgttaacccagctcgtagtatcgcaccagctttatttgttggtggagaagcactttctcaactatgggtattcatcgtagcaccaattcttggtggtatcttcgcagctatcgtaggtaaattcattttaaatactgaaaaatagaattttcaatatttctgaataaaaaaaggcgagccctcattatgaggaagctcgcttttttttattctttcattttagactttaaatttgtaactaattgatctaccgttacatttgcaagtacgttttccatcgcttcttgcgcttgcattaaaataatttctaatactgattgaatattagctcctactggacattcaatgttgggattttcatggaaggaaaatagctgtccttcttctacaacttccactgctttatatacatcaagtaatgtaatttcttctaaatctcgagcaagtgtcgtaccacctttaccagcttgtacatcaacaagtcctgctctcttcaacattcctgtaatgcgacgaatcacaactggatttgtattcacactaccggcaatccattcagaggtacagcgagagtttcgatctatcgcaagtaatgtcagcatatgaacacctactgtaaaacgactactaatccccatctgcacaccctcctttttattcattctattaaaagacgactcttatcattatatactatttttaatttatacataaagaaaaagcatgatttcaataggaaatcatgcttttctctcattattgacgctttataaatttcgctaaatctttaaatttcactttatctgagtaattcattacgccgtttacgtaaatgcggcttgtaacagcatttaataccgcaattgtcgccaataagactgctaatgttatcgtaatttctagcatacctgcttcaccagctacaatacgtgagaaggtaaccatcggtgtaaaaaagggaacgtaagaatttacaacgacgatagtactattcggatcacttaatgatttaatactaataaagaatgcagccataattaaaatcattaccgggaaagatacagcttgtaaatcctccgtcttagacacgacagctccagcagcagcatacatcatcgcataaagtaaatatcccgtaatgaaataaacaagaaacatgctgataacctttgcatctaatttcgtaaagtcaattggaataccaagtagtgaggcactttctaaatcgacccaacctaacaaatatggaataagataaccacacgccaatatgacaagttgcaataacgccgttgaaacaaccgctaaaattttcgcatacatcatcgtaagaggcttcactttcggaagcattacttccattacacgtgacgccttttcagatgcaatattcattgcgattgtatttccgaacgctacaataaacatatataaagcaaatgtaaagaaataggcaattccgaaagaagatgtacgatcttttatcgcttcttgctttacttgaatttctgtttgtaattgctgtgcaatttctggtgaaacattatttttggcaatcgtcaccatcgtatattgttgctttaaatatcctgccataattgcagaagttgcttggcttggaaatccattatacatatatgtaatcgatggagccccatccttttccgtcacatggaatagaccatctaaatcgccttcttctacttgcttatgcagtttatcaaaatcatcctttgaaccaattgttatttttgctgatggcaatagcttatttagctcatctttttgtactttatatgtggaactctctactacaactgcaattttatctttatccttatttttatcatcgcctgaagtaaaatgattaaatgcaaaaatcccaaacacaactaaaaataaaatcgcactcgtaattaatgattttttagataaaaatgcttccctaaaataaaatgaaaatacgtgagaaaatttacgcatcgttatttcgccctctctacaaagatttcgtttaacgtcggctctaacattttgaattgtcgtaagctaacaccttgctcttgcaactgttgcaaaatcttgagagcttccgcatcgtcttgtactttcacataaagaaggccttgttgtttttcatacgatacatgtatagcttctaatcccttttcattctctactgtatcttcaatcgttaaattacggaaaccgtattctttcttaatatcacttagctgtccttttacgactgcttcaccttttttcaaaatacatacatgttggcaaaaagcctctacttgttccatacgatgacttgataaaataatcgtctttccgctctgtacttgttcttcaataatactagctaacatcccagcattaactggatcaaggccgctgaatggttcatctaaaatgagaagttccggattatgaagaagagcagcaattaattggattttttgctgattcccttttgaaagctctccagccgttttaaatttatattctggtatcgctaaacgctctaaccagtgatcaatagcgtgatccacttctttcttcgacattccttctaatctaccaaaatatcgcagctgatctattactctactttttgtatataaacctctttcttctggtaaatacccaattgttacaccactatttccaaatgcttttccatcccatgtaatcgaaccttcattaggcgttaataatccgagaagcattttgattgttgttgttttccctgcaccatttcgtccaagtaaccctagtacttcaccttttggtaacgaaatttgcaaaccgttaactgcttttgattccccaaattgtttcgttaagttttgaatttgtaaactcaagtataaagcctcccctttagtatcattcgtactctctttcaaagactatgtttattcaagacaaaatatagcaccgcgcttcatcctcttatatgtaaacatcgtcattaatccatcatttgttctatttagttaaaattgtaaataacaaagttctttttgtcaattataattgtcattacgacaataaaaattgtcaaaacaactattattattttgctcatctttctaatataggacatactactatatatacaaaagacaatatgcaaatgttcatataaaaatattatattttaatatataatataaaatgattttctaacatcaaggaggatacatatgaagatgaagaggggcattaccactttattatctgtagcggttctatctacatcacttgtagcatgttcaggaacaccagagaaaacagtggcaaaagaagagaaagtaaaattaacagaacaacaattaatggctgatttatggtatcaaacagccggtgaaacgaaagcactttactaccaagggtacaacattggtcaattaaagcttgatacaattcttgcaaaagggacagagaaaaaacctgctatcgtgcttgatttagacgaaactgttttagataacagtcctcatcaagcaatgagcgtaaaaacaggcaaaggctatccttacaaatgggatgattggattaacaaagctgaggctgaagcccttccaggcgcaattgatttcttaaaatatacagagtctaaaggtgtagatatttactacatctcaaatcgtaaaacgaatcaactagatgcgacaattaaaaatcttgagcgtgtaggtgctcctcaagcaacgaaagaacatatattactacaagatccgaaagaaaaaggaaaagaaaaacgccgtgaactcgtttctcaaactcatgatattgtcttattcttcggtgataacttatctgatttcacaggttttgatggaaaatctgtaaaagatcgtaaccaaacagtagcagattcaaaagcacaatttggtgagaaattcattattttcccgaatccaatgtatggcgattgggaaggcgctttatatgattatgatttcaaaaaatcagatgcagaaaaagataaaatccgtcgcgacaacttaaaatcatttgaagtaaaataaaagaggatggcattcgccatcctcttttattttactttctctgttaaaggcaagataaatacttccacacgtctattctttgcctttccttcttgtgtatcgtttggagcaattgaacggtattctccgtatccaatcgcactaaatttttctggttgtaattctttattttgcagtaatacttgcataaaattaactgcccgctgcgtacttaattcccaattcgacgcaaactgcgcattggcaatagggacattatccgtatgacccgatactgtaatttcacgaggtgacgctgaaacaagtaagctagacatctcttttgcaatccctaaagattctaatttcacatctgctttccccgaatcaaacagtatattttctaatattgtcaccattaatcccttttcagttaatttagtttgaaaagaagaggataattgtttttcattaatatattgatcaatctttttttgtaatgctttcaattcatccatctcttttttttctttagctctagcttcttcttgtttttttgcttgttctgcctcaaggctacttgctgataattctttttcatcatttggcttttgatcacttaaaaattctttgttacctgttcccccagctaattcacttcgaaaagcaactgccatctgtttaaacttcgcagcatctatactactcattgcgaataaaacgataaacaatgcaaataacaacgttaacatatcagaatatgggattaaccacgtttcatcgatatgctcatcatgttttttctttttgcctcttctatttttcttactccgcatttttttctgctcctttttctagctttttacgctcagttgcagaaagtgcacctaaaatgcggttcttcataataaacggatatgtaccttcttgtaacattaataaacaatcaatgattaaacgttttttctcaatttcagctgaagatttttgctttaacttatttgcaaatggatgccataatacataacctgaaaaaataccaaaaatcgttgcaataaacgcacccgaaatagcatgacctaacttttcaatatcagttaagttaccaagcgcagctacaagaccgataacagcacctaaaactcctaatgtcggtgcatacgtaccagcttgtgaaaaaatagcagctccctttgcatgtctttcttcaattgcctctaattcagattccaaaatctgctccaaatcttctgcggatacgccatcaatcacaaatttcataccgcgcaaaagaaattcatcttgaattttgtctaattgttgctctaaagacaaaataccgtattttctactttcagatgtccaatgaacaaataattctagcaactgttcataacttaaatcctttttatttgaaccaaaaagaactttaaatagttttggaaccctttttagttgattcatcggaaatgcaatacatactgcagcaaatgtaccgataaaaataattaatgctgcggcaggatttaataaggctgttatgtcagcgcccttgacgaccatccctactaccactgctacaaatcctaaaataagtccaataattgttgcaaaatccattcccattcactcccagtctatacaagaagttctctattctcgataatcgctacatcttcttatgtatatatattacataaaaaatgcatttcatgaaagataagaaatgaattatataaaaaaatactacaaattcacacattttctgacattttctttgcatttctattacgttatgactcttatattccttttccaacaaactagatttataataaaaaaacattacacattttattaagaagggactgtgattacaaggcatcatgaaaaagataataattatttctgccactactattgtaatcgggatcacatctttcgcttactttggttctaaaacaccactacataatgaagcaaaagctgtcgaaagtcaaaagcataataaccataaaaaagaagagattcctgcttttccaaaagctgatcataatgcaaagaaaatagacaatgacttttcagtggtaacaaatcccaaatctaatcttgtcttaattaataaacatcgaaaactaccagatggatacattcctgaagacttaacgagaccaaatgtaccatttattagtccaaaagataaagaaaaaacattgctgcgaaaagatgctgcagaggcacttgaaaacatgtttaaagctgcgaaaaaagaagggcttgatcttacagctgtatctggttatcgttcatacaaacgccaaaaatcgttgcatgatacatacgttagacgccagggaaaagccgaagctaattcggtaagcgcaattcctggtacaagtgaacaccaaacgggtttagcaatggatattagttcaaaatcagctaaatttcaattagagcctatcttcggggagacagcagaaggaaaatgggtcgcagaacacgctcatgaattcggctttgtcattcgttacttagaagataaaacagatacaacagaatatgcatatgaaccatggcacttacgctacgttggtaatccatacgctacatacctatataaacatcacttaacattagaagaagcgatggaagacaaaaaataagagagcaaattgctctcttatttttctttcactctattattgtagtaatttcttcttccattcttcaggccatggttcgcctcttcctgtttttttcgacgcttgaaccatcattccacgacctactaaacaaacctctcctgctgcattcttcaccatataatgtaaatctaaagaagaattcccgaccgatcctgcctttacatacaccttcagctgttcatcaaaatatatttgcttaataaaattacattgtaaatccgcaacaacgatcatcgtttctgatgatgcatgtgtccactcttgcataaatccaagttctttaaacaacgcaatacgagcttcttcaaaataagtaaaagcaacgacattatttacatgtccaaacatatctacttcaccaaaacgaacctttacagggttgtaaaacgaaaaaccactttcccattgctcaaagtcttcaatataagaaatcctcttcattgttatctccccttttcacctttaaataaacagaataaacagaaaaataaagttataaatattgcctcttcgatatgaagaggcaatatttattaatagttattatcgctaccaaagaaatctttgaacgattgaattgttgtatcacggtttaatgccgcaattgaagttgttaaaggaatacccttcggacatgattgcacacagttttgagagttaccacagtttgctagtcctccatctcccataattgcacgtaagcgatctgctttatgcatttcacccgttggatgtgagttgaataagcgagcttgtgataacggtgctggtccaataaagtcagacttactgtttacgtttggacatgattctaagcaaacaccacatgtcatgcattttgaaagctcataagcccattgacgctttttctcaggcattcttggtcctggacctaggtcatacgtaccatcaattggaatccacgctttaacgcgttttagagcattaaacatgcgactacgatcaacttgcaagtcacgtacaaccgggaatgtcttcatcggttttaagcgaattggttgctctaattgatcgataagtgccgtacatgattgacgtggttttccgttaatcaccatcgaacatgcaccacatacttcctctaagcagttcatatcccatgcaatcggagttgtttggttcccttttgaatcaacaggattacgacggatttccataagtgctgagataatattcatattcggacgatatggaatttcaaactcttggtcaaacgcttgcgcatctggcccgtcttgtctcgtaatgatgaagcggattgttttctcagacatgttgtttatcccccttctcttcacccttagcagctacatcgtgttttgaagaataatcacgtttacgtggtttaattaacgaaatatcaacgtcctcgtaatggaatgctggtgcatttccttctccctcaaattttgccatcgtagtttttaagaagtttgcatcatcacgatttgggaattcaggtttgtaatgcgccccacggctctcattacggttatatgcgccaattgtaataacacgtgctaactcaaacatatttgcaagttggcgtgtaaatgaagcaccttggttactccatcttgctgtatcgttaatgttaatacgtttgtaacgagccattaattcttcaattttcgcatctgtttctaataattttttattttcacgaactactgtaacgttatctgtcatccattctccaagctctttatgaagaacatacgcattttcgttaccatccatcgttaaaatattgttaaatttctctgtttcgattaattcattttgctcatatacagtagatgaaacagcatcagatgatttagaaagacctttcatatactcaattgcgtttggtcctgctaccataccaccataaattgctgataatagtgagtttgcaccaagacggttaccaccgtgcatagaataatcacactcacctgctgcaaataaacctggaatatttgtcatctgtttataatcaacccatagtccgcccattgaatagtgaacagctgggaagattttcatcggtagtttacgaggatcatcccctgtaaatttctcatagatttcaataattccacctagtttaatatctagttcttttggatctttatgagaaagatctaagtacaccatgttttcaccgttaatacctagtttttgctctacgcaaacatcaaagatttcacgcgttgcgatgtcacgaggtacaaggtttccgtaagccggatatttttcttctaagaagtaccatggtttaccatctttatatgtccaaacacgtccaccttcaccacgtgcagattcactcataagacgtaatttatcgtctccaggaattgccgttgggtgaatttgaatgaactcaccgtttgcataatatgcgccttgttgatatacagcagaagctgctgtacctgtattgataatggagtttgttgattttccgaaaatgataccagggccccctgttgccataatcacggcatctgctccgaaacttctaatctccatagtttgtaagtcttgtgcaacgattcctcggcacacaccttcatcatcaacaacagctcgtaagaaatcccaaccttcatatttcgttacaagtcctgctacttcgtgacgacgtacttgctcatctaatgcgtaaagtaattgctgtccagttgttgcaccagcaaatgctgtacggtgatgttgcgttccaccaaatcgacggaaatcaagaagtccttcttccgtacggttgaacataacacccatacggtccattaaatgaatgataccaggtgctgcttcacacattgctttaactggtggttggttcgctaagaagtccccaccataaattgtatcgtcaaagtggatccatggagaatccccttcacctttcgtatttacggcaccgttaattccgccctgagcacatacagaatgtgaacgttttactggtactaaagaaaacagttcaacatttactcctgcttctgccgctttaatcgttgccattaagccagccaagccaccgccgactactataagtttccctttcatgctctcccactccttactggtttgctagctgtggatcgatgaacgctaataatgcactcacacctacataagataaacctaagaaaatagctaatgttacataagtagagattctttgtgaacgtggagatactgtaattccccagctgatgcagaatgtccatagtccatttgcaaagtggaaaattgttgaaacaacaccaactaagtagaatgcaaacatagctggattgtttaaaatatctgccatcatatcatagtttacctctttacctaacattgcttgaatacgagtttcccagacgtgccaagaaatgaagatcagcgtaacgatacctgaaattctttggaaaacgaacatccagttacggaaataaccgtaagaaaccgcattgttcttagctgtaaatgcaatatataagccatatatagcatggtacagtatcggtaaaaagatgatgaaaatttctagcgcataccggaatggaaggagctccataaagcctgcagctttgttaaaagcctctgctcctcgtgttgcaaagttgtttacaattaaatgttgcgtcaaaaagacaccaaccgggatgacccccattaatgagtgccacttacgaaacgtatactcgcggcctttcatgtccccattaccccccttgaatgtttgactgctgttttcagattagtttatgacaataatgttttttcactattggcataagaaaaactgaaaaaattattcgaaatatttcagcataatttgataccaagttcattttactcctatttttgtcgaagcgtcaagaaaacgtatacataatttgcatataatttgccaattctttttttcttcttatatattcagattttcctaaagaaaaatctgtttttataaatgtgaaatgttatataatactccctatagaaagaggggaatattgtgagtaaaaatacaatcgatacaacatctttagaagatgtttcattgaacgccttcgcttatgaattgctacgtgaagaattactacctgatttaatcggcaacgatttagatggtattttatactggtctggtagaaaccttgcaagaaaatatccgctagaaacaattgaagaagtcattcagttctttgaaaaggctggctggggcactttaagcattgttgaacataagcgtcgtgaaatgcagttccaacttaaaggcacactcatcgcagaacgtcaaaaacaaaaacgacattcttcttatcaactagaagccggattcatcgctgaacaaatccaaaagcaacggaacgtcgttgcagagtcatacgaagaaaagaaaaaacgttctgactctattacatttcttgtaaaatgggatataaaagatctcattgaagtgtaagcattacctacagtcaactagacatatcagtttagttgacttttttgtattttcattcagatgcatttattttaaatcttcagaaattataccaaaaaacagaagacgttgtaaactacaacgtcttcttatctgttaaatacgtataaatcgtctccgcgacatttttcggcatacccgcttcgacaaattcctctatagaagcttctttcatcttctttaatgaaccaaaatgttttaacaatacctttttccgtttatcaccgattcctggaatatcatccaatgctgattgaataacagatttcccgtgtaattgacgatggaatgtaatcgcaaatcgatgcacctcatcttgaatacgctgcaataaataaaattcttggctatttctctcaagcatcacaggttccggtggatccccaataattaaatgggaggttttatgtttatcatcttttacaagacctgccatcggaatatataatccgagctcattctctaaaatatcacttgcagccgctagatggccttttcctccatcaataataatcaaatcaggtaaaggtgaattttctttaagcgcccttgtataacggcgcctcacaacttctctcatagactcataatcatctggtccttgaaccgttttaattttatattttcgatactctttcttcgccggtttcccatcgataaaagcaatcattgcagaaacgggatttgttccttgaatatttgagttatcaaacgcttcaatacgatatggcgtttcaatcccaagctgcttccctaaatgatctaccgctttaatcgttcgttcttcatcacgttcaattaagtaaaacttctcttcaagagcaatcttcgcatttttatttgccaattctacaaggtcttttttcttaccacgtttcggctgcgtcgcttccacttctaaaaagcgctctactaattccgagtctatacttcctggaacgacaatttccttcggcttaaaatgactactgttttcataaaattggccgataaacgttaaaaaaccctcttctggttcatcgtaaattggaaacatagaaacatcacgttcaattagctttccttttcgaacgaagaaaacttgaacacacatccatcctttatccactgcatatccaaacacatcacgatccactaagtcactcataatcatcttttgcttttccataatcgcatcaatatgagcaatttgatcacgcaactcttttgcacgttcaaactctagtttctctgaggcctcatacatttttatttctagttctgaacgaacttctttatgtccaccatttaaaaacttaataatttcatctacaatttctttattttgttcttccgtcacttctttcacacaaggcgctaaacattgacccatatgataatacaaacaaactttatctggcatattcgtgcatttccgaagtggatacatacgatctagcagttttttcgtttcatgagcagattgtgcatttggataaggaccaaaatatttccctttatctttttttacgtttcgagtaatgagtaagcgaggttgcttctccgctgtaattttaataaaaggatatgttttatcatcttttaattgaatattatatttcggatcatattttttaattagatttaactctaaaataagtgcttctaaattcgaagaagttacaatatattcaaaatcaacaatttctcctacaagccgcagtgttttcccatcatgtgaaccagtaaagtacgagcgcacacgatttttaagcacttttgcctttccgacatatataaccgttccttgcttatctttcatcaaataacaaccaggttgatctggtaaaatagccaacttctctttcaaatgttcgtgcactcgtctccctccatttctacatacttagcatttttattttcccttgaaaacatactatgcccaaacacccaacatacgttcttttattgtaacggaaagactgtaaaaaagaaaataaaaaaagctaccaaatggtagctttttttattttagaagtgtttagaaactaattctactaacgcttctttcggtttgtaacctaacgcttgatcaactactttaccgtcttttaatacgaaaagagctggaatgctcattacttcgaattgacgagcagtttcttggttttcatcaacgtctacttttactacttttactttttcgcctagttctgcatcgatttcctctaatacaggagcgatcattttacaaggtccacaccaaggtgcccagaaatctaataatacaacaccttcgctagtttcagctgcgaagctttggtcatttgcgtttacaattgccattttatttcctccttcaagtatattctaccaagagtatatcattaacttatatacgtggcgaataatatgtatcgttatgtattgtaacaaaaaaatgttcctttatactatataaaaatacggattaaatactaaaaagatgagagacaggggatctctcacctttttctatatataggggtacttcacttggaactcaagggtactaaaatcatgaatgtacttttaactttttaaactcttctgttaaaagaggtacaacttcgaataagtcaccgacaataccgtagtcagctactttaaagatacttgcttctggatctttattaatcgcaacgattatttttgagttagacatacctgctaaatgctgaatcgcaccagaaataccacatgcaatgtataagtctggggtaacaactttaccagtttgaccaatttgtaatgagtaatcacagtattcagcgtcacaagcaccacgagatgccccaacagcgccgcctagtacgtcagccaactcttttaatggtttaaaaccttcttcactcttcacaccgcgtccaccagcgataataactttcgcttcagaaagatccacaccttctgccgttttacggacaacatcttgaatgattgtacgtaaatctttcacatcaactgtaatagaagatacgtcaccgctgcgagactcatctttttccagagttgcaatgttatttggacgcactgtcgcaaataagatgccgtctgttacaatcttcttctcgaatgctttaccagagtaaattggacgagtgaagataacatttccaccttcaacctctaaagcagttacgtcagaaattaaaccagcttcaagcttcgctgctaattttggtgataaatctttgccaagtgctgtatgtcccaagacaataccttctggattttcttcagcatgtacagctaaaaacgcttgtgcataaccatcagatgtatatgattttaatttatcattttcaactgtcacaacgcgatctgcaccgtaatgaatcaattcatttgcaaaagaggcaacgctgtctccaattagaagacctactacttcaccgccttctgcaattgtttttgctgctgctaccgcttcaaaagaaacgttacgtagcgatccatcacgaacttcacccattactaatactttacgagccatagattttccctcctgcatatataatttcgtattttattagattactttcgcttctgtatggagcaacgatacaagttcttttacttgatcttgcagctcgccttgtaacacttttcctgcatctttcttaggaggcaaatagatttcaattgtttttgtctttgcttccacatcatcttcttctaaatctaaatcatctaattctaattcttctagcggctttttcttcgctttcataatacctggaagcgatgggtaacgcggttcatttaaaccttgctgtgctgttactaaaactggtaatgaagttgcaatcacttctgtatcaccttcaacatcacgctcaatcttcacatttgtaccgtcaatttcaagttttgtaattgtcgttacatacggaatatttaacgcttcagctacgcgtggtcctacttgtccagatgcaccatcaattgcaacgtttccgcctaaaattaaatctgcatctttatcttttaaatattcagcaagcacttttgctgtcgtgaactggtcaccattttctacgtcatcttcaatattaattaatacagctttatcacagcccattgctaatgcagtacgaagttctttctcactatcttcgccaccgactgttacaactgtaacttctccaccttgtgcgtctcttacttgaattgcttcttcaattgcatattcatcgtaagggttgatgatgaattccgcttcgccatcgtaaattgcaccgtttttaattacgattttttcttctgtatcaaatgttcgtttcatgagtacgtagatgttcattccatttacccccttgtttttcagaaagattctatcaattttaattttctgttaatttatattaaaaaaataattgaactacctgccactaaatgaaggtttacgcttttctaaaaatgcagctacaccttctcttccatcttcactcgtaaatacttcaccaaaaatctgtgattcacgttgtacaccttcatagtaatgagacgattttgtcgtttgcaataactctagtacagcacgagttgttgctggactttttccagcaatttgttttgcaactttaagcgtatcatctaaaagagattcttcagagaacaatccgttaacaagtccccactttaatgcttctgcaccagtaattggtgtgcttgttaacatcatttcacaagctttcgctttcccaacataacgtggtaagcgctgtgtacctgcaaagccaggaattaatccaagtgttaattcaggtaaaccaagttttgcactttcagttgcaaagcgcatgtggcaagacatagcaaactcaaggccgccgcccagtgccgctccatgaattgccgcaataactggttttgaacatttttcaacacgctcaaacgtaacttgtccaagctgtgctaattctgttgcttgcttcgcttcagtaacagatgtaaattctttaatatctgctcccgctgagaagaaacgtccttcaccatgaataacaacaacacgaatgttatcatccttttccacttgatcaattaattcagtaacgtcatgcataacttgtgaagacatcgcattcgctggtgcgtgatttaacgtcgccaccgcgatatgatcttcaactcttacagataggaatttcaacatgatccctcccattattgacgataaccacaagctgcaataagtagcccgtgtaccgtttttgaaagtgcgaccagatcatacttatgatcgctcattacccaattggtcacaacttcatccactgttccaaagatcatttgtcttgccacgcgaacatttaaatctgcttgaaattcaccttgttttataccagtctctaaaatctcatccataacttgtaagtagccttttaatacttcatttattttaaggcgcaagtcttgattggactgcctcagctctaattgcgtaacgatagcaagaggatcattttgcgacaacagcaagaagtgcgtttctaccaacatgaataacttcgatacagcgctttcaattcctgctgttttttgacgaattgtttcgacaaattctcccatcttctcttggaataaggatattaatatatcttctttatttttaaaatataaataaatcgtgccatcagctaccccagcttgctttgcgattttagaaacttgcgcttggtggtacccattctccgcaatcacaatgactgccgcatcaataatttgattgtatttcggtctatttttcttcactttactgtccccttcaagaagatgactgaatgaatagtcattcatattcttataatactgactatttagaaaagtgtcaatcctattttttcaaaaagaaagggccttagcccgtttgctcatcctcattctttctcttctcttcatctattagaacacggcgcaaaattttccctactgtcgttttcggcaattcatctctaaactcatatactttcggcactttataagccgctaaatatttacgtgcaaactgatttaattcttcctcagagcactccgtaccttcttttaacacaacaaatgctttaactgtctctcctcggtacggatctggaactccaattgtcactacttcttgcactttttcatgctcatataatacttcttcaacttcacgaggatacacattaaatccactcgcgacaatcatatctttcttgcgatcttttacatagaaaaatccatcttcatccatgtagccaacatcacctgtatggagccagccatcttgcaatacagccgctgtttcctctggcttattccagtatcctttcataatttgaggacctttcactacaatttcccctatttctcctggcggtaatgcctcaccagtctcaagtgacataatgattgcttctgtatctggccacggaactccaatgctacctggcactcgcttttcccataaaaaattactatgtgtaactggagaggattctgttaaaccatatccctctactagtttaccacctgtaactgtttcgaacttttcctgtacttctactggcagtggtgctgatccactaatacaagcacgaatagaagaaatatcgtattcttttaaaagtgggctatttaaaagagcgatataaatagttggtgcccctggaaatagtgtcactttatgcttcttaatcgcttcaaaaaccattttcatatcaaactttggaataaggaccattttgtatccttgcataacactcaaattcataacagccgtcatgccgtacacgtggaaaaatggaagaaccccaagaacgacttcttctccttctttgcaattatataaccattgaactcccattaacgtgttagagacgaggtttttatgcgttaacataacgcctttcggaaatccggttgttcctcctgtgtactgtaaaagagctagatcattttcaggatcacaaggctcctcaacatccgtattcacttctttttctactgaattccaaagatgaatcgtttcactctctgatactttcacaactaaatttgactgttttttctgcacaaatggatacaatagatttttagggaatggtaaaaagtccgcaatacgagttacgataatatgctcaatttttgtagcagattgaacattcgttactcttggaaacactaaatcgagacaaagaattacttttgctcccgagtcatgaagctgatattctaattctctctctgtatacagtggatttgtttgtactacgatacctcccgcaagtaatgtgccgtaataaccaattacagcttgcggacaattcggcaacataatagcaactcgatcacccttttccacaccgagcttttgaagataatttgcaaacctcttcaccttatcatggaagtccgaaaacgtaatatccttccctaaaaagtgaagcgctttcttttctgggtagcgagaagccatctgttctacatatctatgaagcggctgaatatcataagaaatcgtactcggaatttcctctggataacttttcaaccatggtttttccaccttcattcccccttcaaatacataaaaataaatgaatgttcattcatgatggttattttcattatattatagtcaccatagcgttacaatcataatattctgacttttgtataactatgctttacttcattaacttcttattatatgtagaaactctcttaatcttaaaagagtaagagagttatagtttaacttaatcttattatcgttaacactgctcctggagtagttgttgataatgttgcgacagctaacaaaccaaataattgcaagctaatagcatctcctgctgcaagagttgtaatgattgttgcactaaatgatgtggttgctaccgcaggagcattaatcgtcccagcaagtgcccctccattaattgtaatccgtgaactgactaataatgaagccgttatattaattgtatatgaaatataataattaccagcatttgcaaccgtaaatactgtgtttccaccagaaacagtaattcctggaccgatgttttgattatttggaagcgggacattcgttccaccaagaactacagatatcgctgttcccgacgtattatttgcaaatgcatatgtcgccgtgatacttgtacctgttgctccggttggacctgttgaacccgttgatcccgttggacctgtcgctcccgtcggacctgttgatcctgttgaacccgttgatcccgttggacctgttgatcccgtcggacctgttgatcccgttgatcctgttggacctgttgaaccggttgaacccgttgatcccgttggacctgttgatcccgtcgatcctgttgaacctgttgctcccgttgatcctgttggacctgttgctcccgtcggacctgttgatcctgtcgctcctgttggacctgttgaacccgtcggacctgttgctcccgttggacctgttgctcctattggacctgttgaacccgtcggacctgttgctcccgttggaccggttgaacccgttgaaccggttgaacccgttgatcccgttggacctgttgctcccgtcggacctgttgctcccgttggacctgttgagcctgttgaacccgttggacctgttgctcctgttgatcccgttgctcccgttggacctgttactcccgttgagcctgtcgctcccgttggacctgttgaacctgttgaacctgttgaacctgtcgctcccgttggacctgttgctcccgttgatcctgttggacctgttgctcccgtcggacctgttgaacctgttgaacctgtcgctccggttgaacctgttgaacccgtcggaccggttgaacccgttggacctgttgatcccgtcgatcctgttggacctgttgaacccgttggacctgttgatcccgtcggacctgttgaacccgtcggacctgttgctcccgttggacctgttgctcccgttggacctgttgatcccgttggacctgttggacctgttggacctgttgaaccggttgaacccgttgctcccgttggacctgttgatcccgtcggacctgttgaacccgttggacctgttgatcccgtcggacctgttgatcccgtcggacctgttgctcctgttgaacccgttgctcctgttgctcccgttgctcccgtcggacctgttgaacctgtcgctccggttggacctgttgaacccgttgctcctgttgaacccgttgctcccgttggacctgttggaccaagcttagggactgtcccatcacaactaaaacaacacgaatcaacatgtacaccattttgattattacaactacaatatccatttgtattattgagccatgaagacatgttgattccttccttcaaattcaatcttataagtacaagtaagaaattaaaaaacatttatcaaatcagaccgaaagctttattcagtggagataaatatagatttatcccgtacattctaataattattacatgcgatactatctccttttgcttgtactttcgcctctctagttaaatgaaattccttttctaaattcttcatacacatatggattttaatcttacataacgatattcgtataattcgttatttttcagcaaaattttaaaaatataattacgaataaaaaacttattttgggaaagaagatgaagaaaattcttagtattttcatggttgttcttctattcgctgttgaatgcggacagcaaaaaagaggagaaaaaggtaacaacgatagaagataaaaagcaaactataacaattaaacatactgaaggggaaacaaaattagataaaccggcgaaaaaagttgctatacttggaacaccttatttcttatggttgatgaggaaaagtgggaagaaagttaattaaaagacggcttcatatatgtgaagccgtcttttcctattatggcagaaaattaatataggctttgtacataatatatataacaagtaaatacatgattatattgaatacacttcgttttaaagttaactttctctttaatttcttatcttgtaatctcaattctattccatttgctattttcaacctacctactatttgaaataactctctgtaatcatcagcatttcccaataatacgtattccttatcatttttatactttatatgcagaaactcgcttccacctttacggtctaatattgttttcatataagctacttcattcaatacacatacctttaaatcaacttcattataataacgatccataaaaaacacatacaaccgtttatttgtaacgattaacacattattaataccgaagttcattgcaagaacgcctacccctaatgtcatggctgtgcctgtctgccaatttttcacatgatgattttcggcaagcatactatataaaatctcttcgcttccctgtaactcttcttgtacaacctcataacaacgtttcattaaaattgttttggttacagtttcttttgtacgatctattttcgttttatctattttctcatcatttctataatcatctacaaaattatcgctatactgtaagttatttaattcctgaagtaacttttctttattcattgcttttcccccccaacagcttcttcaatttctttctccctcttgacagcctgctatataccgtatctcgtgtcataccgaattcaagcgctatttcttgtacgctatattcatctaaatacctttttataaaaattttcttatcttcttcattcaattctttaattaaaacgtaaaaattataatctctctcttcttttgttaaattgacattttttctatcttcatatctttcttgctgaaactcttgtaattgataagccttattactttttcgtttataatcaatggctttaaacttagcgacagatataagccagtttctaaacttcccacgattttcatcataactactaatgttgtaccaaacgattaataaaatatcgtcaacacattcatccactaacaccttactatgtgccgtatctaaaatactatgaactaccttataaattaaatctccatatcgatcaatcgctgtatgtaatgctaacatatcttgttttcgaagaccttctactatttctatatccttcacccttatcaccactctttatcccattctttattcattatatatacgaatgagcacattcgtttcctgacacttttacaaatattttctaattgttttcatattgtagcaatgcttaattaattatttcttgtggaacagggattatattatctctcacgaatttaatctatgaacaaaaataggagggataactatgtaccaaacaattgaaggctttttacaatcatggacatacgaggctgagtctactcagaaaatgcttgattcattaaccgatgcatctttatcacaggaaattgcacctgggcactggacgttaggaagaattgcttggcacatcgtgacggcagttcctgtgatactatctggcacagggctaaagtttgaaggagaaacgaaagattatcctgttccaacttctgcaaaaacaattgcagatgaataccgtaaagtaaacgcggcttttgttgaaacacttcaaagtaaatggactgataaagacttagctactattaatgacttctttggtcgccctatgccgaattctatatttttaatgacactcattaatcatcaaaatcaccaccgcggacaaatgacggttttaatgcgacaagctggcttaacagttcctggcgtatatggccccgcaaaagaagaatgggctgcggctggaatggaagctcctaaaatgtaacgacaaaaaagacaagatgtttacatatcttgtctttttctgtaacttgtttcatgtgaaactattttttcttaatagttgttttatggaaaagataggttaaaatgaatacatactatgaagaggagtaaccaaattgaatacaaagaataaaaaaatagctatgggcactattttattaacttctattattggagttattagtgtatctctttatttcacctattatggtaccccttggggaaaacaagcagcaattacggaatcaaaagaatatattacaaaatattttaatctagatgcagaagtcaaaaacacttcttacgatgctaaaatgaatagctatgcaatcgcctttgaaacaagtggagacggagagtttactatcgaatataaaagtcctaataactttaacatttctccaggagtgcaagagtatttaagtaaacactataaatttacagagtagtaccgaagcatacatatacaaaaaaagagttggtgtaacgccaactctttttttatttattcttgtcaaactgttatatcttccttctctatatttttaattccgtaatatgcaatcacagctccaattgctgcgagtgctagttgaaggggaagtaaagttgctgtaggaaactctgggttggtattcattgcaattgctacaacgataagagatgaaacaattgtagttggcactgaacgtttacgcattccgaaatataatgggattaaactcatccccgcagttgcaatggctaaaggaactagttttattccttcttgcaccaattgatctactgtgaatgaatgaggaagaattgaaaaacaactatctatcccaaagaaaattcctactactaaaatgttagatacaataactgttataaatgttactatcgctgtaatagccaacttactagccatcattttctttcgattaatgggataagaaaacatgagtagtattgttttatttttatattcgtcaattattaaccttgctattaatacactaccaaaaataataaatgttgctcttactactgtactagccattaacaaaatcatctgcggatctcttatttctggatctccttctatttgtgcaatgaaactaacaaagattaataatgccagtataataatatttgcaataactgctcccctcacataccatccaaacttaaatttcttcaattctaacttcataagacgtagcatgatattcctccttcctccttggacttaatcaatataaatgactcctgtttcacttaaaatcttcgcttcattttttgcatcaccaatcgttcctacttttattttgtctgtatttttatctttcttaagtccttttaaatccactattacgtcagccgaattacttttagccataagcttcaatgatgcagggacacctttataccgtacgccaatatcacctgattttgtttctataaataatgattttccttctgtcatatctttcagtaatacttccccagatgttgatgtgatgttcatatttgagttacttacatttgttatatagttatcaccagtcgtagactttatatttaattcttgtactgaactaccttttaaaactaactctccactttgcgatataaattcacctttctcggctgatagtcctgtaatcatttcatctccagacttgccttttgtcatgatattttttactactatatctcttattttcacatcacccgatttattatttactacaattttatctatttctttcttcggaatagctatagatatactatttttcttcctaaacgtgaaaccattaaaaaatctgttcatcttttgtttttgcttaatcacaattttattttcatcattttctattttgacaggatctatctctttatctgcttgttcaccttgagcgaaaattactattttattagcgtctgtacttttaaattcaagattccagttttcattatctacttctatttcttttatattatttatctcaaaagacttttctttcttaaaatctttcccctgaaataccttaataccaaaaactacactagcaattgtaatgaataatattgcaattactattatctttttcaccattcataccccagttcattgttgttttaagcttgcttcacaccacatcaatcttatcgattttacgatatgaaagataactgatgaaaattcctaataaacagagcactattgggatagctataaaattaaacagacttacttgaccgtttccaggaccaaagttactactaattagcattccgattattactgcagaagtaattgttgtgggtgtcgatttctttctcatcccaaaaaataaaggaattaaacttataccagatatcataaatgcacttataaaagtagttggaacgatagatattatttcacctatcgtagctggtgtttcaatcagtcccatcattggactcacaaaatatacaagcaaactgatactgaaagtagcgataatcgtgctcacaaaacaaaaacaaaaaacaattgttaatttcgccctcattagcattttcctttgcagcgggtacataaacgataattgcatcgttttgttcttatactcatcaattactaaacgtgataaaatgaccgaactaaaaataatgaatgttatcctaataaaagtgtttattaaaaccatttgttgcgtgaagtcaaagaagagcacgtctccctcggctttcattcccaacgccataaggcttactgcagcgaaaattgctataatacaaattgctacccctttaaagtaactagataatttatgtttcttccattcgagcttcattaatctaagcatacaaaccactcctccattctttatataactgtctttatgctgctaacattctaattccagcagtaacgaagcttaacattcctattactattagaattaacaaccatttccgctcaggttttctataatataaaatcccacttatgaacattacgatcaatccacttagtagattcactaacaatccattaagcatgaatgccctctccatccattacatttaagaaatattcttctaaggaactatgtttcttattaatactttcaatttccacatcgttcataataagtgcttttgaaatggcctgctgagacgctaacgtatcatacacacgaatcatggttccactcattattttgtagttttttataccaagtttatcttctaaaatataagctgcacgtttcacatcaggaacagtgatttcaatgtactctgtttgttttccgttaatactcttcattgaaacttcttttattagttttccattttgaatcacaccaattgtatcggccattagttccatttcacctaaaatatgactagaaactaataatgtaatgccatattctttgcagagcattttaaataagtctcgtaactctttaataccaattggatctaaaccgttaattggttcatctaaaatgagcaattctggctttgtcacgattgctcttgcaataccgagtcgttgtttcattcctaatgaaaaatcttttacttttttattatctaccccttgtagtttcactaaatgtaaagcatggtcaattgcatttttatcgtagtagcccatgtattcacaatgtaggtctaagttttctttcgccgttaatttatcataaaagattgggtattcaataattgtccccattctttttaatacttcataagatgtatctgttaatttctcaccgaagatttcaatatcaccactcgtcggttttattaaatttgtaatcattttcataatcgttgttttaccagcaccgtttggtcctaaaaaaccgtaaatttctccttttttcacatgcatgttaacaccggaaataacttctttccctttaaacaccttcgttaactggtttgtttttaatatatatgtcatgttactttcccctttcgcaatactctatatttctataatagacaacggaaatctcttttttcttacccgtttcttacaaattccttacgctgaaaaaaagcttgtagaatctactgctctacaagctaaaactgtatctttattaatgcaattgtaaaaattgttttttcatacggtttactagaaagatgaatttttccgtccatcgcttccacaagccgtttcgtaatcgttaatcctagaccgcttccttggtacaatctatttcttgaatcttcaagtgtgtacatacgctcaaacactttatcaatatgagattcatcaatcccttttcctttatcccatacatctatatacacgcccgtgtcatcatctcttaacgtcataccgagtgcctttccatcgtctccatatgtaattgcatttgatattaaattattcaataccctacctaatacttctacatttccaagtgcatatatatttctttctggtatatcaatatgaacctgaaaacctttcgtcgtcactaaatcataaaatgataaaatcttctcgcggcaaacttcattcatatttatttttgtcatttcaattgctttgtcaccagattctaatttcgctaaatcaaaaaacttatgaattaattccatcacttctagtgttttcgtatgcactttctcaagtaatatttgttgttcttctttatttatcgttttatccttatttaacatttctgtatatccaagaataactgttagtggtgttttcaagtcatgcgaaatatttgaaagcatttttctcatcgaaatttctacttttgcatgatctgcattcgttttctgttttgcatctaataattgattaatcgccactaataatttttgcaattctagatcatctgtcataacgagtaacgtctcacctgttttttcatttacaatactttctaacttttcatatgtgtatcgtaaatttttactactattttttctcattttatattgcatataaataacacataacaatataaaaataatacctattaacaaattgatcatattacatcacttccagcttatagccgatgccccatagcgttttaatatattctggattagatggatcactttcgattttctcacgcaatcttctcatatgaacattaataacgttatcgtcaccgtaatactcttcattccaaactaacgtatatatttgcgctttcgtaaatacacgattttggttctttacgaatagctttaaaatctcaaattcttttaaagtaagtttgagaggcttcccgtttttttctacagtaaaattaattggatcaattgttaaatcaccaatttgaatcattttttctattgtttctgtagccgagtatttcgtagacctccgaatacctgcttttacacgtgcagccaattcaatcatagaaaacggcttacaaatgtaatcatctgctccaagtcctaatccaacagctttatcaacatctgtatcttttgccgacatcattaaaatcggaactgcacttttttctcgaatgattcgtacaacctctaagccatctagctttggcatcataatgtcaaggataatcaaatcaaatgaaccttttaaatatgtgttcacgccttcttctccatcagacgcaatcgtaacttgaaagccttcctttattaaatacttttccaccatctcttgaattgagatatcatcttcaactaataaaatatgatgtgacatatgtctatcccctttttacaaacgttaacaatccaattgtatcgtaactactacagactggaaacaattatatgaattttcaaaccaacttcccttccttccttaacaatgatatgatgaaattcactacgattgttcataattaactttatataaaggagacttatcatgtcagaaaacaaaaaagtaagcttagctgatttaatgcgtgaacaacttgctaagaaaaagcaaggaaatggaaatggtcaaaatgcaaaaaatcaaagccaagaaacaaaaaaattacaaaaccaacaaacaaagaaaacaaacaaccaacgtagacgtacaggtgtataaatgaacggacaaaaacgttctaatatcgcccccggtcttgaagttgatattgtattaaaacaagatcaacgaacaggcaaattaacacgtggaattgtaaaagatattttaacaaactccccttcccatccgcatggcattaaagtgcgattgcaggacgggcaagtcggtagagtacaaaatatcgttcaataagaaaaggagctcaagtaaactcgagctccttttctttattaacctttaattttctcgatgaaaactacttttaagtagtctccttctttaaattgatcaatggtacggaaatcttctggtaaagaatgttcttctaatattttatatttgccattcatttctttaaaggctgtatcgataaagcctttaaactttttcatatcgaatgcgctacaatttgtagaagcaacgataataccgttattttctgtaatagcaattgtttcttttaataaatttttataatcttttgctgcactaaatgtatatttttttgagcgtgcaaagcttggagggtcaagtacgaccatatcaaatttcatttttttcttcgctgcatatttgaagtaaagaaatacatcttctacaataatatcttgcgcttcataatcaacttcatttacactaaactgctcaatcgttttacttaaactacgatttgcaaggtcaacactcgtcgttttactcgctccgccaagcgctgcaaatacagagaaagcacctgtataagagaacatatttaacactgttcttccttttgcatatttatcacgaatttgttttcgaacgttacgttgatctaaaaataccccaaccattgccccatcatttaaatacaccgcaaagtttacaccattttcttttacgataagtgggaactcgccgcgctctcctgctacgaaatcatccccctcaatatatttccctttcgtatcaaaacgctttttctcataaatacctttaaagtttgctactttttgaagagcggctataatctcatctctgaaagtataaatcccttcactataccaacttactacataatagccatcataataatcgataattagtcctccaagaccatcaccttcaccattcaccacacggaatgctgtcgtatcacttgatttgtaaaattgctttcgtttatgtaaggcagatttgattttactttcaaagaaagattgattaatttgttcactctcttttctcgttaaaatccagccgtaccctttattttgttttccataatagccttttccgataaattggttcttctcatctactactttaatgattgttccttcttcacgaacatcatttaaattttgaatcgcatcttttaaaataagcggatatccacttttaatttcttttataaatttcggttttatttttacagttacttctgatcgcatataataacttcctttccatttgcatgctttctctacaggaagcatttaaaaaacgagactgaaaaaacagcctcgtttcactataccatattattgctttgctagtacaactcgctcattctctcgcttaactgccacatatttactacattttgaactggaaatcttactgtccaatataatataaaaaacttttatatttcacatttagcattgacaatgataatgattttcattatcatttaatgtatatgagttctcgaaaataaaggctatatttataggaggaataaacatgattatcgttacaaatacagctaaaattacaaagggaaatggatataaattaattgagcgttttaataaagtaggtaaagttgaaacgatgccaggctttttaggtctagaagttcttttaacgcaaaatacagttgattatgatgaagtaacaattagcactcgctggaatgcaaaagaagatttccaaggttggacaaagagcgctgcatttaaagatgctcactcacatcaaggcggaatgccagaatatattcttgataataaaattgcttactatgatgtaaaagttgtacgtatgccaatggctgcagcacagtaaaaacagtccttttttaaagtatagaatatgagaagcgttatctatcacttctcatattctatacttttttctttaatttctttttattaattttgcgtgtacaactagccttccagcctctggatcaagcgcatagtcacaagtagaaagtgttacgatttcatcattagccgtcaattccgtatccgttttgtacagtgatttttcttgaatttcctttaagaacgatgtatatgctgcatcattttcaaaatccgtttcaatgtaataaaagtccgttgttgtcgtgtatactgaaaaaacttccacgtcgtatccttcaaataatgtatcgtaatataatttacgatgagacataaaaaagtcttcatccaacatcttttttaaactaccaaacatagaaccgtctttcatacgatggccatataaaatcgtatttcgattttgagatttcacatcattacgatggtccataaaaatgcttcccgctctcatatcttcacctttataattacgaaataaatagtaatcattatcttttgcttgaacgattggataattaatttgtgtatcatccatcgtaatccatccgactatctctggattaattttctggagatcctgaaactgtttacgtacctctccatcttctgatttttcttccattggacttcttttataaatatgttgtgcctcagccattactttacgattttcataataatccatgaaaatcccgcccaactcatacattgaatagaaaaagattcctaaaaacacaattgtaagtatgcgttgaaaaaaagaattctttttccgtcctttcttactattcaaattatcacctcaaaacggattatgctcagcctttagattcccataggtaccatgtacaatccggtatcttcatcctgctttacaatgacatctacaccatatattgctttaatcatttcttctgttattacatcattaggattacctttcgtaatgatttctccatctttcataacgataatatggtcgctataacgaatggcttgattaatatcatgtaataccattacaatcgttagtccatgcacttcatttaactctttcactaactctaatatttctagctgatagtaaatatctaaatatgtggtcggctcatctaagaagagcattggtgtattttgagctaatgtcattgcgatccaaactcgctgcctctctccaccagataaagcataaattggcttatcacgcttactttgtaaattcgtacatactagcgcacgctcaatcgcttctctatcttcatctgtttgcggagagaatatatttttatatggcatacgcccgaagcttattagcttttccactgtaatatctgctggagcctcattttgttgatggacaaccgctagttttctagcaaactctttcggtttatattcactaatcgctttcccatcaagtattacttctccactgctaggagcgtggtttctagacatgacactaagtaatgttgatttcccacatccattcggtccaatgattgttgtaattttcccaatttctatttcactactaacagactttaatcgatttgttacgttatcgtatgaaaaggttacatttttaatttccatgaactttatcactctttccaagcaagaatattaagaatggaccaccaataaccgccataattgttgctgctggaatttcgttaggtggcacaattaaccttccaatcgtatctgccgtcaaaattaataacgcccctgcaagagcagaaaatggaattaatactttatggtctgaaccgactaattgtcttgaaatatgcggaactagtaatcctacaaaagcaataacacctgcaatcgctgttgatactgccgctaagagtactgcaatggcagaaataataagacgaactctcgtcacgtgcaagcctaagtttttcgcagtcttatcttgtagcgataataagttacaccaagctcctacgaacagagcaagaataagaccaatcgttccataagtcaccattatttctacatcgccccacgtcttcattgttatgttagaagtcgtcgtttgcttaatactcttaataaaatatccacaaatcgtaacgaatgattcatttaatccagtaaacattgcattaatggcaataccaattaaaataatgcgaagcgggcttaatcctgatttccatgaaaacgaataaacgagataacatgcaagcgcaccacctaaaaaggcgaatacgggtgtccagaaaaagaattgcgggaacaacgtaataataacgagtgtcataaaacttgctcctgaagatataccgattaccccagcatcagcgagtggatttttcataacagcttgaaaaagcacacctgaaacagcgagagccgctccagtgaacaacgcaataataatacgcggaaaacgtaaatctttaatgacttcaacatcttcatttccacctgtaaatatcccttgtacaagttcaacaatacctacttctaaactacctttcatcgctgacaatgatgtcataacaataagcaatgcagtaacaatgaggaaactccaagtttttttattcattctactcttcctttatattaaaatgcatcacggatacatcatttttttcaattcatctaatgcttcaattgctgctaaattacctgtcgttccaaataaacgctcttctaaatcgtaaacacggttatttttaaccgcagcaaagtgtttccaaatatcatttgttttaaattctttatcaaacatttttacaacttcatcaggcataccatgagctgctcgtaaaataatatctggatcagctttctttaaatactctgtattagaagctaaatattctacttgttcaccttgcacaatatttttaccacctagttgtttcactaaatctccaatataagaatgctctgttgctactaaataacttcccggcacacctaataaaataagcactgtcggttctttctttccttttacttctttttgaatgctagcaacctttttatctaatttagttactactgcttcggcctgtttttcacgcccatatttcttacctaaatcgctaatagaactttgcatatttttcaaactcgttaaatctaaaaagtttgctttcatacccacaccatcaaaaactggctttaattcatattcaagtgttgtcacagataacacttctgaaggctttaatgactttaccttttccatatctggactcattggattcccaacttcaggtaaacctttatatcgcttcggtaaagttttagaacttgttggaacgccgactaaatctacttctaacgcatccataatttcagtaacagccactgttgttgcaacaacgtgctctttactttcactctttacctgctttgctgattctttttttggtgatgagcacccggctatacccattaacaaaatgatagccattagtacacttgcaattttcttcactctcaatcaccactcctttccatacaatatgaaacaagtcttgatgcacgcgaacatgcatcaagactccaaaaattacaatctacctgctctatatttacgaactagtaaagcaagtgaacctagcagtaacaccatgtataaaccaagttgtgctgtatctgcagtttttgagtttttctctttttttgaatcattttttgtatcttcttttttcttctgaccatctgcatttcggttaaaatcaggagtacctactgtttttacattatctactttcggtgtagtcactggatttttcggttcatttttcggttcctctttaatagttcctaacgcgccgatattatttgtatcaaattgaatttgtacatcgtagaaatgatggtagttcatctcatcgatgtctacctttacttttgcgtttaattttttaaatagatcttctacttcaaactgtactactcgcgtatttgcatttttatcttcgcttactactttcgcatcagcgaatagttcattgttttccgcttggaatttcgtaatccacgcactatttttcagcgtcatctcaatatattttttaccatcttttacgattaatttcgctggatttacaacatagtcatgcatctttgaaatctcatctgttttatcttttaatactttaaatgtaatatcatattggccatctactaaatttttcgaatcaactattactctcggtttattattttcatcttggttgttgtttccaccttggttgtcgtttccgccttggttgtcgtttccgccttggttgtcgtttccgccttggttgtcgtttccgccttggttgtcgtttccgccttggttgtcgtttccgccttggttgtcgtttccgccttggttgtcgtttccgccttggttgttgtttccgccttggttgtcgtttccgccttggttgttgtttccgccttggctatctaacggcttaatgctacctttatcaaatgcaaattgaatatcgtaaaaatggtgataattcattgaatcgatatctacttttacttttgcatttaacttttttgataaatctggtacttctacttccactacgcgtgtatcagcttttttatcttcacttattacatgtgcatcaacaaacgaaccatttttctcaaattcaaattttgtaatccaagaactgttcgttaacgtaaatgatacatacttcttaccatcttttacttttagcacacctggactttttgtatatgtgttcatcattgaaatttcgtctgtttgatcttttaatgctttgaaattgatgctgtattcaccatctttaattgtttcagcatctggttttttattttcatctggtttttctacttccggtttttctgcttccggtttttctgcttctggttgtttctcttcatttttaatttgttcaagtttatcttgttcaaataaaagttgtacatcatgcgtttgcttataatttcttgatgccatttcgataaatacttttgtatttagttttttagataaatcgtttacttcaaactctactactcttgtatctttttccttatcctcactcactacttttgcatcaacaaatgcgccatctttttccgtttggaaatttttaattaatgagctactttttagtgttacaattgcttttttcttaccgttttctacttttaatactcctggatttaccatgtaagtattcatcttagattcttcatctgtttgatcttttaatactttaaatggaatgctgtacgtaccatctgtaattgtgttagaatttggttgttgatctgggtcaggcttttggtcgggcttctgacctggatcggtagtttcatttggatctggcttattagctgggtcctctttttcatttggtttttctacatgaattggtgtaatgctattttgatcaaatgcaatacgaacgtcgtactcatgatgataatttaaaaaatcaatatctacttttacttttgcatttaataccttctctatatcttctacatcaaattctactactcttgtatctttttctttatcttcactaattacatttgtcgcaactagcttacctgctttttctgtttcaaacttcgtaatccatgaactattcgttaatgtaaaggatactttctttttcccatccttcacttttaaagttcccggacttactgaatattgattcatcattgattcttcatctgatgtatcttttaaaactttgaacccaattgaatattcaccgtcagccaacttggtagctgcttgaactgcaagtggttgtaatgttgatacgaatgtaaatatcattaaaaacatagcaacaataatttttgtatacctgttcaatggaacgactctcccttttgaaaattatttaatactgctcccatcaaatacaaagcgaatatcatatgaagcattataattaataattggaatattaatttccacctttccatttagtttttttgacaagtcagcaacttcaaattctactactctagtattatcttttttgttttcacttaacacgtttgtttctacaaattgaccatctttttctacttggaaacttttaatagaagcactatctttcactttaaatgaaacatattgttttccatttttaactgttaatgttgctgggctttcaaaataactattcattctagacgattcatctttatcgcctttccatacagtaaaagcaatattatattttccatcagctagttttgtagcagcctttgcatcttgtaaacctagtgttgcgataaacgtaaataaaacagcaaatacagcaataatcattttaaattgtttaaacatatattcatcccccttcaaaagatttatttactcaacttcactttacgaattaagaaagcacctgaaataagaattaacgctacaaacaatccaatacgtgcttcatcgcctgtttttgggttatctgttttttcagcttttccattttcattttttgtttctttgttcacttctttagctgtttccttactctctacttttgttttctcttcttttacttgtgtatctgttttcgcttgatcattattttttgttgtagcagctacgccgttatcgccacctacagcttttacatttgcatcaaaagcaaaacgaattgtgtagtggtggtcatagtttgcatttggtacaacaacatgaatttttacagctgccggtttggataaatcatctactttaaactctactgttcttttatctgccgattcatctttactaacaactttcgcatcaacaaaatccccattctctggtgctttaaattctgtaatccaagcactatgattcatcggaacttgtactctcatctcaccgtttttcactattaattttgccggcttttcaaaatagtcatttgccattgaagctgaatcattttccgctttttgaattacgtaattaatatcgtaagtaccatcagctagttttgctgaagcattcccgtatggcattacaagaaaagctagcatacatacgaacgttataataaaagcgggtaatacagaaacctttttcatttttcttgtttcctccttggttatctttcatttcactttttgaaaatgataattattctcaatttataagaaaaaaaataatctcttctacctattatttaattagcattcttttatgtaacataagtattattgattatcattctcattgaatattaaaaataatatctcaccctattccttatacgaaggcatagaaactgagaaaaaatgataaaacgcatttattgattatcattctcaatgtaaatcaaaaaaaaataaactatctcttctcctcttctttcacctcttcccacaacaacactatagttatagaaaccccttttccctcacttcccttccaatatttccacaactaagtcaatcttagcctactcataaattttttgtcaactatattacgtataaaatttttaatatctgaatttctctatatacggctttttttacaaaaaaagagactttctataatagaaagcctcttttctctatttttctacagcaatttcctgcttttgaaacttagaaactatataaccaaatcctataccgattatgcctggaactaaccaaccaattcctacactatataatggaatcttatctaaaataggtgctagcgctgcaatttgaaggtttgcattgtgtaatccatcaaagaaacttattgcaaatgctcctacaatcccgcccacatacatcgctaatggaagacgaacgtagttttcaacaagtgataatacgataagtacgattccaattggataaattgcgattaagattggtaatgctaatgcatttaactgagttaacccaaggtttgctaccataaatgctaatacacagaaaatgaaaacgactttttgataagaaagctttggtaataaggaagagaagtaatcaccacaagctgcaacaatacctacagaagttgttaaacatgctgctgtaattgcgatccctagtaataaagttccgtagctaccaaataaatgattcacgacatttgttaaaataattcctccgtttgcgcccattccaagtgacacactagaagctccaagataagcaagtgctaaatacacaagtagtagaccaagtgctgcaataaatcctgcaaagattgttacttttgcaatactgtttttatttgtaattcctttttcttttaacgcatgaattacaacatttccgaataccagtgctgcaagtccatctaaagttaaatatccatcaataaatcctttaaagagaggagcactatacgcttctgtcggtgcaccaaattctccaattggtgtaataagtgctttacctacgataattgcaataacagctaataatattggagttagcaccttaccaatacgacccactaatttcgaaggatttaaagctaaatagaaagtgactgcaaagaaaataagtgtaaagataacaagtggatatgactgaccagctatctcacttggtaaaaacggtgcaacactcatctcataagctactgttcctgtacgcggtacacttacgaatacgcctaaacataaataaattgcagtgataaaaacaagtgcgaatataggatgtacacgtcctgctagctcattaatatctccctttaaagctataacaattactcctaataaaggtagtccaacgcctgttacgataaaaccaaacagcgcgatccatacgtccgttccagcaccttgccctaacgctggtggaaaaatcatattacctgcaccaaaaaacagtgcaaataacattaaacttattgcaaacatctccgaaaactttaaagatgatttcattcctactaacctcctaaaataattaattaacaaaatattctgaattaaaatccgtcacatatcctctttcaagcatacttccccgtaaaagaacgcaaaaaacacccgtccctaacaaagggacgagtgttgaaatcgtggttccacccttattctaataaaatgaattcataacgaaataagctcattttatagctcgtgtaaattgataacggttttatccgccaagaattacaatgcatcatgtatgcagttcactcttgaagtttagaggtggtaagcttgtcttttcgtattaggaagctcacagcctaaggcttccctctctgagaatcgtaaaatacaactcatgtcctcatcattacttttataaaatatcttgtcgaaacttgttgttttttattatatgggctattttttaaaaaatcaatagttttattttttctgacaaaaaaatatagggagaaaattttccctccctataactgccctattaaaatttctaactcttcagctgtaacgctccgccactttccaacttcaagctcatttagctctatattcataatgcgtactcgctttagctttattacagtaaatccgaaagcacgactcattctacgaatttgcctgttcattccttgcgttaaaacgatacgaaatgttgattgatcgactcttgtcactttgcacggcttcgtcattccatctttaatctttacaccgctggacatctcattaataaaccagtccgtaaaaggtttatcgactgtgacaacatattccttctcgtgctcatgatcaccatgtaaaattcgattcgcaatgccgccgtcattcgttaataagataagtccttccgatactttatctaatcgtccaactggaaagattcgctctggataattgatataatcaataatattatcttcaatatgatcagctgctgtacaagtaattccgactggtttatgaaaggctatgtacaccttttctttctcttcttttacaataacttgcccatcaatcgttacaacatcaccatcgctcacaagttcaccgtgcgtacatatttcaccattaatagccacgcgtccagctttaatgaggcgatctgtttcacgtctggagcatgattttgcttcgcttatgtattggttgattttcatgttctattccttttcacatatattaaaagcgtcaatctatggcaatatcattctgccacgattgacgctttttcacttcgcaaaaacaactaaataaataaccccaatcaccaaaaatattccgcaacaagctaacaatacttttgcaagtttgtccataaacatataatggtttcccctttgtttcgttgttttctattttaattcgacaactgttacgcctaggcctccctcgcccatgtcaccgtaacggaaggtttttacaccgcgatgcttcttcaagtaatcttgtacaccttggcgaagtgctcctgtccctttaccgtgaataattgatacgcgaggatagcttgcaagctgggcatcgtctaagtatttctcaacgcgcgccattgcattttcaaatcgctcaccacgaaggtcaagttctaatgaaacgtgatagtctctaccttttaccgttgcaactgcttttttctctgtttgcttcggtgtgttaatgtattccatgttagattcttttactttcatcttcagaataccgatttgtacgctccactcagtatcgcttactttttcaagtaattgacctttttgaccgaacgttaatacttttacttcatcacctgcacgtaactgttgtttcggcgcagtgtttttcacgtttactttttgtttcttaacaagctctggtgctgcgccttctagacggctcttcgcttcaattaactcgtggtctttcacgtttgcaagctgtgctttacgcaattgacgaagttcttgaataatgccttctgcttctttctttgcagcttcgactttttcttccccttctttttgcgcttttaataatcgttcatcgcgatcttcgttaaattcaataatttgacgttgtaattcacgatgaagtttttcagattgtttgcgaagtgcttctgcttcgttccagtcacgctctgcgttcttctggctttcttctaacttcgcaatcatattttcaattttattcgtatctgtactaatgtggttgcgtgcttggtcaataacgcgatcagataatccaagacgtttcgaaatttcaaaggcattactacggcctggtacaccgattaataatttataagttggacttaatgtatttacatcaaactcaacactcgcattaataacttgctcacggttatatccgtatgcttttaattctggataatgcgtcgttgcaacaacgcgagcaccgcgattacatacttcatctaaaatcgaaattgctagtgcagccccttcttgtgggtctgttccagcacctaattcatcgaataaaactaagctttcaaaatcagctttttctaaaatatcaacgatgttcaccatatgtgaggagaacgtacttaaactttgttcaatcgattgctcatcaccgatatcagcaaatatatttttaaacacacaaatctctgactcatccattactggaatgtgaagaccagattgcgccattaaaacacaaataccaactgttttcagcgtaactgttttaccacctgtattcggtcctgtaataacaattgtcgtgaaatctttacctaacataatgttatttggcacaataatttctggatcgattagcggatggcgagcttgtcttaaatccatataacgctcgttatttacgattggtttcgttgctttaattcgctttgcataaaaagctttcgcaaaaatgaaatcaagattcgcaactacttctacgtttgataaaacgatatcggcttctactgccacttcttctgttaacatcaataagatgcgttcgatttcttgtttctctttcacacgagcttcttgcagtgcgttatttaattctacaatgacttgcggttcaataaataacgtttgtccagaagctgattgatcgtgaacaataccaccatatacgccgcggtattcttgttttactgggattacgtaacgttcgttacgaatcgttacaatcgagtcagacagcatcttttgcgcatttgaagagcgcgtcatattttctaatttttcacgaatacggctttccgcagtacgaatttgagtacgaataccacgcagtttatcacttgcgctatcgactacttcaccgccgtcaccgatacaatttgtaattttcttttctaaatcatataaagatacaatttgagcgacgtgagtttctaaaatcggaagctcgacaccgttatcagccatatcttcaatgaaacgtttcatattacgactaccatacatcgtattcgcaatatcaagtaattcatttggacttaacatactcccaatttttgcacgcttcacatttgagcgaatatccgtaataccacctaatggtgcactaccttttaaacgaataactttcgctgcttcatccgttgtatcttgcatttctacaatttcttcaaaatcagtgctcggcactaaatgcttcactttgtcacggccaagtgaagaggctgtatgttcaagtaattgttcttttactttattgtattctaatacacgcaacgttctttctaacatgttgcaggtcccccttgcgttacttattacgtttaatatagtctaataaacgttcaatatcccatgtgttaatcacgttatctttttgaatccaacctttacgtgctgctgctacacctgtttccatatcttctaacatttcaagtgtatgagcatctgtattaatcgctacttttacaccagcatcttgtgcttgttttaataatttagcgcttaaatctagacggttcggattcgcatttaattctaaaactgtatttgtctcttttgcgagttcaattaataaatctgtatctacatcataaccctcacggcgcccgagaagacgtcctgtcggatgagcaatcattgtgacatgtttattctcaagtgcagtacgcagacgcttcatgatcgtttcacggtcttgtgagaagctagagtgaatcgctccaataacatagtctaattcttctaatacttcatcatcaaaatcaagcgaggcatctggtaaaatgtccatttcaattccgcgtaaaattgtaatgtctggatacttttcattcatacgttcaatttctttcgcttgctcacgaagacgctctttcgttaaaccattcgctacttttaagtattgcgagtgatcagtaatcgccataaacttatatccacgagcacggcacgcttgtaccatttcttcaatagaaaaagcaccgtcactccaagttgtatgcatatgtaaatcaccttgtatatcggaaaactgaattaagttcggatactctttaattaattcaatttcttttccatcttcacgcacttctggcggaataaatggtagaccgaaatgagcaaagaagtcttcttcagtctcaaatgttttcacttcacctgtttctaagttctctacaccgtactcactaattttctcgcctttatcttttgcgatttgacgcatttttacgttatggtcttttgatcctgtgaaatggtgaagtgttgtaataaactcttctggttttactaagcggaaatcgattgaaatatcatattcatattgaagacgaacagaaactttcgtatccccacttgcgattacctcaatcatattatcgaattgtagtaaatgctcacgtaccgttgctggttctgtcgttgcaatgataaaatctaaatctttcactgtttcacgaacacggcgcaaactaccagcgcgagagaaacgaattacttcagcaatattcgacaatttctcctctatttccccggcaataggcaataccatcgcaattggtaaacgctctggacgagagcctacttgatcgattgcttctaatattttctcttctgtcttcttaccgaaaccagctaaagcttgtactttattttcctcacaagcagcttttaacgtctccatatcaataacgcctagctctttatataacttagccacctttttaccaccaagacctggtagttttaataacggcaataagctactcggtacttctttttcaagttcttgtaatacttcagatgttcccgattctatatattcttgaataacggctgctgttccttttccgatgcccggaatctttgtgaaatcttcaatctcagaaagactacgatcgtcactttctaatgctgctgccgctttacgaaatgcagatattttaaatggattcgcaccctttagttccataaaaagcccgattgtctctaataatttgataacttgttttttatttactttcatcattaccccgcctttctttcatagaaaaaaacttctctttccgaaaaaagagaagttatactctgctacctgtctgccatagttccttcaccttttcagatagaatcggtgtatcgtctacaattattttgctaattgatgatttttgtaatggtgtttgtacttgttcaatcggaagaatgtttccaatgataattaagacaaacaaaacaatatatacttctaaaaatccgaggattgcccccgcaaacgcatttacttgctttaaaaccggtatttctgcaaacatatttaacaaattaccaagtaatgaaagtgctatttttgtaataataaacaatatgataaacgcaagcgcttgataaaatactgtctcaatattatttgcatcaatccattctggaacagatacgtttttatcaaatggatacggaataaatttcgcaagtgctggcgctaaatctttacagtaccagtatgcaacaaggtatgcgataataaagcttgttaactttacaagttgcagaataaaccctctgcgtaagccgaggaaaaatcccataacaagcagtaaaatgataataatatcaatcatgttattccattcctttttttgtcatactttctttcaatttctcatgttcttcttttaattttatgtaatcgtgtatgacgtttaccgccgtcaataccgctagtctactcgtgtcaagcgaaggattcttggcattgagttcgcgcattttatcatccacaatcgctgctaccatgcggatatgacttgtactttcatcgccaacaactgaatattgctgaccatagatttctacattaattcgacttttctttcccttttgttgtgacaactcaccggcctccaatcacgtacagaatcctaaagtttatcataccatgaaccttcataatatggaaacagaaagaacaatccgatatgataaaaataacaatataaaaaaaggggcgaccattatgtcaaattctatcgtaattcaaacaaattctacagtaattgaagacatgaaacaacaatataaacattcacttagcccgaaaattccgcaaggcggtatctttatggctaaggtgccatcttgcacgattacagcgtataaatctggaaaagtaatgttccaaggaggccgcgctgaagcagaagcttctcgttggcaaactgtctctcacgcgccgaaaacagctgtaaaaaaatctgtcgattcccatcgttatgcgccgcctacttccatcagtacaatgtctattgtagggtctgatgaagttggtacgggagatttctttggaccgatgacagtcgttgctgtatatgtggatgcgaagcaaattccactactaaaagaacttggtgtaaaagactctaaaaacttaaatgacgatcaaattattgccattgcgaaacaacttctacacgttgttccttatagctctcttgtccttcataatgaaaaatataacgagctatttgataaaggaaacaaccaaggtaagttaaaagccttgctacataataaagctattacaaacttattagcgaaaatggcacctacaaaacctgaaggcgtcttaatcgaccaattcacacaacctgatacatactacaaatatttagcaaaacaaaaacaggtacagcgtgaaaatgtttattttgctacgaaaggtgaaagcgtccatttagcagtagccgctgcttctattttagctcgctactcattcgtaaaacagtttgacgaactaagtaaaaaagctggtatgccacttccgaaaggtgctggtaaacaagttgatatcgctgctgctaaattaattcaaaagcttggtaaagaacgattacccgagtttgtgaaactgcatttcgctaatacggagaaggcgcttcgcttattaaaatagtatcgacaaaaacaggagcctacaaactcctgttttttgtttcatcctactattgtccttatagttttgttataattataatatacagattattctaacataggaggagatctacattgctacttctacaaatgattctaaatattttactaggcgatccacacgaaagacagttcgaaattagagaaaacattcagctactaagtggacaaccagcgttcaacgatttaatagaacgttatggtcgatctttcttattaaactttcggattcgaagatttatcgggaaacacgatgcacgcttgttaatacataatccagcaaaactacaacacttctgtgaagaacttgaatgtatgattagaaaaaggaggtttttcatatgaacgctgtaaaagttaaaaaggtacgatatgctttcgtacacctcgtaggtccactttcttacctcactatttctatcatttggggagcttttttcactactaaatccacattcgaaaatatatatgataatcttggcgtgatggccatctattacgtgttcatgagtttactgtggtttttctatttagatcgattagacaaagacataaataagattacaaaagaaattaacgataataagatgtaacacataacaaaggagagcccttaagactctcctttgttatgttagcttcgtttctgcttcttatttgatgaagatactttatgagaacctgtttcatgtgtcgtcgttccttgtccttcaacttctggagaacctaggcccgatcttgaatgatcttttttcacttttttactcatttatattcaccccttcgcgttactttttgctacgagggaataaactatacaatatgtaaaataaaaagcgagaggaaatcctctcgccttttttcatattttagaattcagaagaacctggagttcttgggaatggaattacgtcacggatgttagccataccagtgatgtacattaggaagcgctcgaaacctagaccgaatccagcgtgttttgtaccgccgtattttctaagttctaagtaccaccagtagtcctcttcgttcatacctaattctttaattctgtctactaaaacgtccattctttcttcacgttggcttccgccgattaattcgccgatgccaggaactagaaggtcagtagcagctactgttttaccgtcttcatttaaacgcatgtagaatgctttaatgtctttcggatagtcagttacgaatacagggcgtttgaagatttcttctgataagtatctttcgtgctctgtttgtaagtcaattccccattctactgggtatttgaagtcagcacctgattcttgaagcactttaattgcttctgtataagtgatgcgaccgaagtcagagttaattacgttgttcatgcgctcaagaactgttttatcaacgaagctgttgaagaattccatttcttctggtgcatgctctaatacgtatttcattgcatatttcagcatatcttctgtaaggttcattacgtcccctagttcagcgaatgcaatctcaggctcaaccatccagaactcagcagcgtggcgagttgtgtttgagttttctgcacggaatgtaggtccgaatgtgtatacgtcacggaatgctaatgcataagcttcagcgttcagctgtccacttactgttaagtttgtttctttaccgaagaagtcttttgactcatcaacttttccgtcttcaccttttggtaggttatttaaatcttgcgttgttacgcggaacatttcgccagcaccttctgtatcactaccagtgatgattggtgtgtgaacatgtacgaatccacgctcttggaagaattggtgaatcgcaaatgctgcgatagaacgtacgcggaacgttgcagagaatgcatttgttcttggacgtaagtgagcgattgtacgtaagtattcaaacgtatgacgtttcttttgaagtgggtaatcagaatctgataaaccctcgatatcaattttttctgctttaatttcaaatggttgcttcgctcccggcgttgcaattactttaccttctactttaactgaagagctaagtggaagttttgcaatttctttgaagttctctaattctgtatcgaaaacgatttgaacgcttttaaagaagctaccgtcgtttaattcgatgaaaccaaatgcttttgaatcacgtaagttacgaatccaccctgatacttgtactgtttgatctgcatacttttctgtatctctatacagactttttactaatgtgttttccatagtgaaattctcctttgctcatatatttaaatacaaaaaaacctttcatccataaagggacgaaaggttaaacttcgcggtaccacccaatttgtcataaagaccaactttaactcgtatgtaatacatacttcccggtttgtaacaggccggattcccgtctaagtctactcttgaatacaaaattcaatttcggttagcaactccaaggtgttcttcacatataccgcctcatcaggctctcaccgtccctgactcgctttggattatagtatatactacttttccttatcatcgtctttcattttgttaaactaaaattaatgtactacattcgagagaaagatgcaaggtgtcggaaaatatatgagcgatttttgtaatatatcgacttaccgacagtgtccgacaaccaatccaataaaaaaattgccggaatgaatccggcaattttctaattacttacgtaactccgcaccgaatttctcttctaccgttgttagtacacggttatgtgcttctgttacttcttcgtctgttaatgtacgttctgcatcgaagtaagtcatagagaatgcaagtgatttcttgccttcttccattttttcaccttcgtataagtcgaatagtgttacgtctttcagaagttctccgccagcttcagcaatgacttgcttcatttcaccagcttttgtttcttttgttactacaacagccatgtcacgtgtcatagatgggaaacgtggaattgctgagtagtaagtttcctcagcgtctgcaccgaatacttttacaagagataattcaaatacgaatgtatttttcacatctaattgtttttctgcttctgggtgcaattgaccgatgaaaccaattacttcgccatctaatacgatgtcagctgtacggcctgggtgcataccttcacgttttgctggtgcatatgtgatttgatttgaaacgccaagcacgtcgaatagtccttctagtacacctttcacaacgaagaagtctactactttcttctcaccttgccatgcatggtgaagagcaagacctgtcataacacctgcaagatgttgttcttctttcggaagttctccttcttctgtcggtaagaagatagaacctacttcgtataaagcaacgctgtcgtttttacgagcgacattgtatgaaactgcttctagtaattgcggtactaagcttaaacgaagttggctacgttcttcactcattggaagtgcaagacctacaggcgccttttcgtttggctcaaccatatattgtttcgctttgtcagcgcttgttaatgaatacgtaattgcttcatataaaccagcaccctctaagaagcggcgtactttacgacgtttcgtttgtgctgatgttaatttaccacgagtcatcgttccagaaggtaatgtaactggaatgtggtcataaccgtatagacggcccacttcttctactaagtcttctgaaattgtaatatcaggacgacgtgctggtacatttacatggaatgttccttctacttctgtaaatgggaatttcaagtttgtgaacattgtacccatttcactcgcagaaatatttgtacctaatacacggtttactttttcagcagtaacagatactgtacgctcttgtacttgtaagttgtcagcttctactacaccttcaagtgcttcaccgccagcatatttcgccattaaagcagctgcgtgttgaattgcttcaaatgtacgtgttggatcgattcctttttcgaaacgtgcacttgattcactacgaagacctaagtcttttgatgtacgacgtactgtttgacctgcaaagtatgcagactcaattagaacgtttactgtctcatttgtaacttcagaatccgccccgcccattacaccagcaacagctaaagctttcgtgccgtttgtaattacaagatggtggctttgtaatgtacgctcttgatcatctaacgtttcaattttttcgccttcttttgcaagacgaacaacgatttcttttgaacctaatttatcgtaatcgaatgcatgtaacggttgaccgtattccattaaaatgtagtttgtaatatcaactacgttgctaattggacgaatgccagctgccataagacgagtttgcatccacattggtgatggaccaatctttacgtttttaaccatttttgcaatgtataacgggttttcttctttcgcttctacacttacagaaatataatcagaagttttttctgctgtttcttgtaagtcgatagctggaagttttacttcgcggccataaatagcagctacttcatatgcaacacctaacatgtttaggcaatctgcacggtttggtgttaaaccaagctcaagtacttcatcgtgtaagtttaaaatttcaagtgcatctgcaccaacttcagcgtcacttgggaagatgaagataccatctgcatattcttttgaaactaactttccatcaatgccaagctcttgaagagcacaaaccataccgtgagaagcttcaccacgtagttttgcttttttaattttgaagttaccaggaagtacagcaccaacttttgcaactggtacttttaaaccttttgcaatgttagcagctccacaaataatttgaactggctcttcttcaccgatatcgattaagcatttgcttaatttatcagcttctgggtgtttttcacattctaatacgtgaccaactacaacaccttttacacctttatttaatacttcaacgccttctacttcaataccacttttcgtgattttgtctgctagttcttgtgctgttacatctttaatatctacatactcttgtaaccaacgatatgatacgaacatatttatcctctccttcccttacgctcgtttgaattgttgtaagaaacgtacatcatttgtatagaaatgacgaatgtcatctactccgtatttcaacattgcgatacgctctgcgcccataccgaatgcgaaaccttgatattcttttgaatcataaccagccatttcaagtacgttcgggtgaaccatacctgcgcctagaatttcaatccagccagttcctttacaagtgccgcaacctttgccatgacacatcatacaagaaatatccatctctacagatggctctgtgaatgggaagaaacttggacgaagacggatttcacgatcttcaccgaacatctttttcacgaatacttgcagtgtaccttttaagtcactcatacgaatgtttttatcaattacaagaccttcaatttgcatgaactgatgcgaatgcgtcgcatcgtcgtcatcacggcgatacactttaccaggacaaataattttgattgggcctttttctttattattttccatcgtacgtgcttgcacagaagatgtatgtgtacgtagtaacgtttcttctgtaatgtagaatgtatcttgcatatcacgcgctgggtgatctttcggtaagtttagtgcttcgaagttgtagtagtctttttctacttctgttccttcagctacttcataacccataccgatgaatacatcttcaatttgctcaacaacagctgttaacggatggtgacaacctgtttcaacaggacgacctggcagtgtaacatcgattgtttcagtagctaatttcgcttcgattactgctttttctaagttactaattttgtcatctaaacgcgtttgaatcgcttcacgcacttcatttactaatgctcccatacgtggacgctcttctgctgacaattttcccatgccgcgtaatacttctgtaattgggcctttttttcctaaatacgctacgcgtacgtcgtttaagccctttagctctttcgcttcttcaataagctctaacgctttttgctttagctcttttaaacgtgcttccattttggaaccctcctaattttaaaaataaaaaaacctcgctcccaaaaagggacgaggtaaattcgcggtaccaccctaaattgacagaacaagtctgcccactcattagttataacgatcaattctgaccggaacgcctttacatatacatggtcctggcgtcaactccagaggtgaattcacttccgtctaccataagaatgctttcagtctacggcactctctccctatatggcgattttgtaagttactcttctctatcaacgtttttcgttatttaacttttaatataatgtacttcaacttattataagaagttttttatttgttcgcaaccgggctttgcaaataatacgttaaaatccctgctgcaaccgcaacatttaatgattctgccccgccgtaaatcggaatatacaagttttgatccgtttttgcaagaatttcttggcgtacgccatttccttcatttcctacaattaatgcaaaactgccagccggcgttacttcaccatacggaactccattttcaagagctgttccatatacaggaacgttgttttcttttaacttgtctacccattcttctaagttcccttttacaattggtaagtggaaaatagagccttgtgtagagcggagtactttactattgtaaacatcaacacaaccttctccaagcacaacggcgtgaataccagctgcatcagctgtacgaataattgttcctaaattacctgggtcttgcaggccatctaataaaaggaatttcccatcagtaagagctacttctttctcatgcttctcacaaacagcaaatacaccttgtgtcgtttctgtttcacgaagtattttgacaatcgcctcaggtacgatatacatttccacatcattaactgtccaatctttcggaaggtctgtctgatctgaaacgataagttctgttacaattcctgccttcaaagcttcctcgactaagtggaatccttctacaaaaaataaaccttttttatcgcgttcttttttcgtttgcagctttttccactgctttacacgcggattttgtactgaatcaatgtttttcataatatgtatttccctctcttcttgtcttatcattatagcctatttttcatacatatttacataaaaaagaacaaaaactaacgtcagtttcaattctgaagaagaggtgaaagcaatgagttttaatttacgcggtgctgtattagcgaatgtatctggaaattcacaagatcaattacaagaaacaatcgtcgatgcaattcaaagcggtgaagaaaaaatgcttccaggtcttggcgttttatttgaagtcatttggaaaaacgctgatgaaaatgaaaagcacgaaatgttagaaacactagagcaaggattaaaaaaataagcaatttgaaaatcacctttgcataagctaaggtgatttttttgcagaaaaattttttcttctcctaaacatttctactttactaacgaactatgatggagtacaatgttcaaaatacatttaaaccgatcgatttttcttcatatacaccataagataaaaggagtgaatgttttatgcaccgtattacgcttgaacaaatttttaaacaccacattacacaaaaatacgtaaaccgttctggaatggtccacgcgatcgctgtcgcttaccatgcgtttcacctagccaaaaagcatcacgcctcagtcgatgctgccacaaaagctggcttccttcatgatatcggacatcatacgtggtacacaggcggtgaatgggattatgacttatataaaaagaatgatatacacgcaattaaaggcgctgaaagagcacataaattacttattagattaggagaacatccaaaactagcaaaagaaatttctattgcaattcttcttcatacagattctttcttagtggaacaagaaattgaaagaacatctcttcaaaatattattaaatgggcagacgaagcagatgaagaaccgggcggagcgcatcattatcgaacaatttcttatgaaaaagcacttaaagcaattcagcaattagatcgattggtagagcgtgaattgcaaatagagcaagcaaaattgaataacaagacagaacatagttatcaatgagaaagaggcatcactacagggtgatacctcttttattattttatggaaaatacacctttatatgtaatatttaaatattacgcctgaaaacaaaatgccttataattaaatatacaaatataaagaggtgattctacatatgcaacccgctacacaactttctaatgaacagaaatactctatgtcatggggacaatttattagctccgttgtattcgcttttttcggaaccggacttattactgtgttcctcgcaatgcccttaacaatttatacagccagtcttacagataaaaaacaaattgccctgtatgaatctatcgtaaatactgcaagtattgtattacagctagccgtgttgttattcttcatttttaaattcgaacccgcaaaaaaattactactacaatcatttaactttaaagcactgaaagaatggcgtacatacgtatacttacttcttttcttcgctataaacattttactcaattacatcttgttaaattatgtgttccaagacgctacaaagcagcaatcttccgcactaaacttagatgtctttaagcagtatcaaatattattacttctcggctttgcaatactcacaccaatttttgaagagcttattttccgtggctttatacttcgctttttctcagaacgctttccattttggattgcagcgattataacaagcttcttcttcggtatcgctcatacatactcacttggcgtaatggtcattactttcttcatgggattattaatggctattttatgtaaaaaaacaaaatccattattccagctatgttatttcatattatgaataatatgttggcattcttgaattagaaagaggtatcctcacgatacctcttttattaattcgtataatcacttctcatttccatcaatttatacatatttattaatattatccaaaataaacttcatgtagtaaaatataacttaattcatataaaggagtttacatatgtttagtgttatttggatgcttttcacgccacttctcttactatgcgggattgctggtggtatttttttaatagtaacaggaattaaatatcggaaattactcgttggtttaatggggctacttagcctatcctttgtcacactaccttttgtttttttaagtataggaattaatatggatacaatattccccattccaactgctctttactggaccctattttctttaactggattattagcagggataagtggattccaagcaaaaattaaaagtatacgtaatatggggttcattatttttaccattggaatattaggggttatcttctgggtactcatgtctgtaggtgattgattctatataacttttttcgaaacccacaaatcggaggtaatacagaaatgttcggaatattaatttggatgattttagcttttactttaatgttatgcgaattcatcgtcggcatttttttaattattgctggtatgaaatgtcgtaaatcatttactattatagctggtttaattagcatatctcttatcgttgttcctatcatttgtataggttatggaatagacttagaggggatgattccaatttcaggaactttatattggggtctcttctctttagctggactattagctatagtaaacggaagacacatatcgagtattcgttctatggggacgattttatttataacaggattatgctctgtaagtggttattaccttttatatcttactctttaaaaagacaaaaaaagcagggaaattaattccctgcttttctatttggtttattgcctgatggtaagaagaacgataacacccaagcgatacctgctagtatcgttgcgattaagaaggcatcgttaataccgttaattgcagatagctttgaaatttgtccatataatagttgtgtgctcatcgcgtctcctgcttgagctgatccagctaaggccgctaaactttgccccatgccatgtattttatcaactaaaattgggtttgatgttgttaacatgttgccgtaatctgctacgtgagcagtcgtttgttgcgtcataagtgtaattaaaatcgctgttccgattgaacccgctacttgtcttgacgtattttgcgttgctgtaccgtgagaaattaatttcatcggcagcgcgttcataccagccgtcataattggcatcataatgaatgacataccaattgaacgtataatataatccgtcataataacgctatacggtgtatccatcgataattttgtaaattcatatgtcgcatacgtcgtaattgccaatccaattatcgctaatggacgaatgccatatttatcgaataatttacccgctactggtcccatgatccccataattaatgatcctggaagaagtagtaaaccagattcaattggcgtaaagccacgaatgttttgcagatatactggaagcaataacatacctccgaataatgccatcgtaacgattgcgttaattactaaagtgaaagtaaatactggatatttaaatacttgtaaatcaagcattttattgtccgttgttaactctctccaaataaataacgctaaaccaattacaccaatgataagtgaaataacaacttctgcactagtccaactattatttccagcctcactaaatccgtacagcaagcttcctagcccaatacttgaactaacaacaccaaatacatctaattttgttttagacactggctgagctagtgtaaagaattttaaagataggaacgtaataattaaaccgataataaacatcgcatagaacattaagttccagctgtaattttcaattacccaacctgttacagtcggtccgatagctggagctaaaatcatcgctacacctagtaaccccatcgctgctccgcgcttatgaggcgggaacaatgtcataaagatattcataccaaccggcattaaaatacccgcaccaactgcttgaattacgcggcccgtcatcatcatcgtaaagtttccggaagtagcacaaatgatagatcctaccgtgaagaataacattgctgctacgaataatttacgatacgtaaatcgtgaaactaaaaatgcactaatcggtactaaaataccatttacaagcatgaagcctgtaattaaccattgtgctgttgaagttgatacgttaaattcattcattaacggaggtaatgcaacgttaatgattgtttggtttaaaatagaaacgaacatgccgagaattaatacagctacaactgcttttacgttcacattctctacaggcgtagacatttgttttttcggcacttctttttcttgttttacttcttcttgctttcctgtttctaactcaactacattagaaatttccgattcttgctttcgttcaatttctttctcttctgtttcaactttacttatttctattttacttacggctgggacttgttcttctcccattttcgtttttttctttcgtaaaagacgatttacaaggaagaagacgattatacaaaatagtgcatatcctgcaattacaattgaggacatctcatctcccccttacttatgaatacgaactgtcacattcatgccaggaacaatatttactgatttgctatgatctaaagaaattttaactggtactacttgtgttactttcgtatagttcgctgttgcgttgcttgatggcaacatagagaatgtattcgctgttgttaagccaacttgttctacttttcctgttaacgttgtatctgggtatgcatctacatacacatctacattttgacctttttgaacatcatcaacatctgtttcttcaatgtttgctgttacccataaattgttcatatcaaatgcataagcaatcgggctacctgctccaacgaaagcatttgttgtcgcgtttgattgtacaactgttgcattttgtggaattgttacatctactgtttgttctccattagctgccgctacagtaacagtacctaatttatcgttctcattataattttttcctacttcagctttccattcagttagtttacctgctactggtgaagcaaccggaattacctttccatcaatctttgcattgtctgtttttaagtaattttccgtttgattgtaatagtaataaccgccaataccgccgccaactagtacaattaatgtgataatgttgataattaccattcttcgaaactgattcattgcattcctctccttatatcgcatataatttttttctaaactatttatgtccttattgtttagattgtttaattgttaattatattaaccttttaacaaaaaaatcacaccatttgcagcgtaaatcgaaatttatctacctgcgagcggtgctgatttctgaaggactatcgtttataattataaataattattttgaatctacaaccgacaatttatgtatgaaatgtcggttaaacaacaatataataccaatatgttgtttaagtatagaaaattaaacgaggggaaataaaaatgtctattaaaaatacaaatgatccacgtgtaaaacggacgagacaactcatacaggatgcttttgtcgctttagtaggcgaaaaaggttttgaaaatgtaactgttcaacatattgcagaacgcgctcctgtaaaccgcgctacattttatagccattaccacgataaatatgacttactagacaaaagcattgaagaaatgttagaaaagctaactgaagtaattaaaccaagaaatagaaataaagaagatttccaactaacatttgattcgccacatccaagttttttggccttgttcgaacatattgcagaaaacactaacttctataacgtcatgcttggtgataaagcggccggaaactatacgtataagatgatgaaagcaattcaaacgcatttaacattaagcctctctatttcacaacctaacgatgaaaaactaatggttccacgcgatattctcattagttatgttactggtgcccatctagggatgattatgtcatggctaaaaagagggatgatatataccccgcattttatggcgatgcaattaactcgtttaattattttaggtgctcatactgcagcgggattagaacggcctttttaaaacataaaaaagcgaaggagaatgtccttcgctttttctattaattaaatgtaatgttatgtacagcctctttatcaagacgtttaataacttctacaattaactttactgcattttcataatcatcacggtgtaacattgccgcatgagaatggatatagcgcgttgcaattgtaattgccatagaaggaataccatttacagcaatgtgaatcgcacccgcatccgttcctccgcccgctactgaatcatattgatacgggatttgtaattcatcagcaacatcaactacgaaatcacgtaaacctgtatgtccaataacagaagcatcatataaaatgatttgtggtccatcgcccattttactttgcgcttcttttgacgttacacccggtgtatctccagcgataccaacatctactgcgaacgcgatatctggtttaatataattcgcagatgtttttgcgccacgaagaccaacttcttcttgtacagttccaacgccgtatacaacgtttggatgcttttcatcttttaattgttttaatacgtcaattgcaattgcacaaccgattcggttatcccatgcttttgcaagtaacattttttcattcttcatcacttggaattcaaagtaaggtacaacttgatctcctggtcgtacgccccactccattgcttcttcttggctagaagcaccgatatcgatgaacatgtctttaatttcaactggctttttacgagcttctggaggtaaaatgtgcggtggttttgaaccaattacacctgttacatctcctttacgcgttacaatcgtcacgcgctgcgcaagcataacttgtgaccaccagccaccaaccgtttggaagcgaaggaaacctttgtcatcgatttgtgtaatcataaatccaacttcatctaaatgacctgcaaccataattttcggaccgttttcttcccctacttttttcgcaactaaactccctaaattatcagtagaaagttcgtccgcaaacggctcgatatatttcttcattacttcacgtggttcacgctcgttaccggcaataccacgtgcatctgttaattcttttagcattgtcaatgtcgcgtctaattttgtcattgccaacaccctcctttttcttcagtcaatttattatacaataattaaattgaaatattcaaaaattaaattagtatccttgtgtttgacgctgatgatttacttcatttttatctaaatatgctttttcaatctcttcttgctcaaattcaagtgcttgtccaagtcgaagatagctcgtaaataattcaatatagtttgtaatagatggttgatctgtaaaacgaattactttcgcatatgtgtctaagaaaatttccacttgtgttttattcgtttgtgcacatttatagaataggaagtttttatcaatacctaaatcaattccgattgataaaataaaatgcaaaccatctacgtactcttctaatattacttcacgttccgaagctggtttgttgctccaatatttaaaacaacgtgtttcatttgcaagttctccaatttctacaagaagagctaacattttttcttttaacaattttttcggttgtaagtcatgttcttttgcaatacggtcatctaattctttttgtaatttaaatagttgtagtaagtccattctattgtcctcctccaacatcgcatttttcgcaacaatgttgtttcatctcaaagttcattattatgtttcagttcttatgaataagtcagctatctacctctttataaaatagcttgtccttaatttacaaatacgtttcagtcatcgctcttaaattgttcatctgatgaaagttccatatcatctttccattatagcagtgtcgtttcggctaggaaagatactcttctttccaaaagagcagaattaaaaaaagccaggagtattctcctgacttcatatatatattcttctatactgctataacttttatattgattttgtcatattgataatgacatagtcgttaatctttagaatttcttttcacttctaacttctctttgaatacaaataaaaaaccttagaagaaaattcttctaaggttttaactaattaattagttaatgttgttttttgcaactgttgctaattcagcgaaagctttttcgtcatgaacagctaagtcagcaagcatcttgcggttaacttcgatgccagcatttttaagaccgtgcattaagcggctgtaagaaagaccattcatacgagctgctgcgttgatacgtgtaatccataatttacggaagtcacgtttcttttgacggcggtcacggaatgcatacattagagatttcataacctgttggttagcaaccttgaataatgtattttttgaaccgtagtaaccttttgctaatttaattacttttttacgacgttgacgagtaactgtaccaccttttactcttggcataatattacctcctaattgttctatatatcagccgaacttattttaagttgtcaagcatttgacgaatgcgtttgaagtcaccagcgcttactacaccagctttacgtagtttacgtttagcttttgtagatttgttagcgaataaatggcttgtgtaagcgtgagaacgtttcagtttacctgatccagtctttttgaaacgctttgcagcgccgcgatgagttttttgtttaggcataggtatttcctcctctatctattacttatcgtttttcggtgctaaaactaagaacatactgcgtccttccattttaggcttagattcaactgtactaacttcagcacaagcttctgagaagcgatctaaaacacgttgaccgatttctttatgagtaatggcacgtcctttaaagcgaattgacgctttaaccttgtcgcctttctctaaaaacttgatagcattacgaagttttgtgttaaagtcgtgttcatcaattgttggacttaaacgaacttctttcatgctaattactttttgatttttgcgctgctctttttctttcttctgttgctcaaagcggaatttaccgtagtccataatgcggcatactggcggtttcgcatttggagcaactaatactaaatcaagattaagatttgcagctaagtctaaagcgtcattacgagacttgattccaagttgatcgccatttgcgccaactaaacgtacttcacgtgcacgaatttgctcgttaatcatcatatccttgctaatagtaagccacctccaaggttttctcagaacatattttgtagtcatagaacccgaacaaaaaaagtgcgggcatacgacacccacacttgtaaaatcttaagtaagaaatacatttacctgttaactgcgaatgcgtccatcaggtgagaagcgggtgcttctacttgttccacaaaacaatattctattatccttgatgagtttatcataggacatgacgtctgtcaagaagacgcgatgtgttttactaacaacaagaaatattgtaacaaacaactaacatacttgcaatacttttttatgataagtgtcacatggttattttttctaatttctctcgagtatattacataaaaaagccgcggtataccgcggctttttcttatcgttttccttctactttaatcatgtcaacaaaagcatctaatgcgattgtttctgatttttgttcaccatatttacgtacgtttacgccgttttcagttacttcattgtcacctactacaagcatgtacggaattttttgcatttgtgcttcacggattttgtaaccgatcttctcttcacgagtgtctaattcaacacggataccagcacgacgcaattcgtcttgtactttcttcgcatagtctaaatgtacttgcggagaaactggaattacttgtacttgaactggagctaaccatgttgggaatgcacctttgtattcttcaattaagaaggctacaaaacgttccatagttgatacaacaccacggtgaattacaactggacgatgttgtttaccgtcttcaccaacgtatgataattcaaagcgttctggaagtaagaagtctaattgtacagttgaaagtgtttcgtcttttccaagagcagtacgaacttgaacatcaagttttggaccgtagaatgccgcttcaccttcagcttcatagtaatcaagacccatttcatccatagcttcttttaacataccttgtgctttttcccacatctcatcatccgcataatactttttagtatctgctgggtcgcggtaagatagacggaatgagtagttctctaaaccgaaatctttgtacacttctagagttaagtttacaacacgttttaactcttctttaatttgatctggacgaacgaaaatgtgcgcatcgtttaaagtcattccgcgtacacgttgtaatccagataacgcacctgacatttcataacggtgcattgttccaagttctgcaatacggattggtaattcacggtagctgtgaatatcatttttataaaccatcatatgatgaggacagttcattggacgaagaactaattcttcgttatccatttccattgatgggaacatgccatcacggtagtggttccagtgaccagaagtttcataaagctctctgctccctagtactggagtatatacgtgatcatagcctaagcttgcttctttatcaacgatgtaacgctcgataatgcggcggattgttgcaccttttggtaaccaaagtggtaaaccttgtcctactttttggctattagtaaatagttttaattctttacctaatttacggtgatcgcgctctttcgcttcttcaagcatacgtaagtgctcatctaattctgctttcttaacgaatgcagtaccgtaaatacgttgtagcattttattattgctatcgccgcgccagtaagcacctgcaacgcttaataatttaaacactttaattttccctgtagatggaaggtgaacaccacgacaaaggtcgaaaaattcgccttgctcatagattgaaataactgcatcttctggaagatcgttaattaaatctaattttaactcatcgccgatttcttcaaagcgacgaattgcttctgcacgtggtacttcatgacgaacgatttctaagttctcgttcacgattttttgcatttctttttcgattttcttgaagtcttcaactgtaattgcttcttccatatcaatatcgtagtagaagccattttcaattactggaccaatgccaagctcaaccttaacatctttatataaacgttttaacgcttgtgctaaaaggtgggctgttgaatggcgtaaaatatataggccatcttcagaatctaatgtaatgatagaaactgcaccatcttcttcgattggtgtaacaagatcgatcatctcatcgtttaattttccagctacagcttttttctttaagcctgggctaatagaagctgcgatttcttcagttgttacgccttttggaaactccttcacagctccatcagggaaagtaattttaactacatctgccatcactggtcactcctctttttctcaaaataaaaaacactcatcccgtaaaaagggacgagtgttgaattcgtggttccacccttgttccaattaacataattgttaattgctcaagttcaacataacggtgttgtccgttagcaattactagaaaaaccgttcactgctaaagtttagaggtggtaagtaataatcccgtactaggaagctcacaccctaaggcttccctctctgaaaatcgtagaaaactactcatgtcctcatcatgacatttcaatatatttcatttatgtaggtaattatatgctcaaaaacttagaaaatcaagggcgttacctttattttttaaatttttcacattgcgctcaaaatcatgtaatccatgtaattggacccgttcttggaacacatttcgcaaagtaataatcatattatggtcttgttctttcgtatataaataaatctttttaggcgaaatagaaagaagcggcgcaattactttcgtatcaatatatacatcattttgctttaataattcctcatctatatattggaccaacttctcctgttttaaacgtctacctttatcatcataaaagataaagctttcatcaaaaataagatgcacgcaagacaaacgtgatttacggctacttacttgttgccgaagcgtctcaatgaacatttggtattcttgctccatcttatattcatcaattgccacttccgcaagtttagtcaccatttccctatatgtacgaagacgaaaacggatatatgatgaaaacgagaatgagagcggatcacaaagccaattatttaaagaagacttaatatatgactcaaatgcgttacgcgttaaatcctgagctacaccttttcttcttccctttaaaatctcatgtgccatgtgcaatatttgatgacactcttcttgttcttcataaaaaaacttttcttttaaaatcgtataaatccactcattttgtttcacattcacaatgaaatacaccattactggcaataagattttttcaatataattcgattcacgtactggtatgtgaatcaccactttttgttcctgtaaatacacactcgtttccttatataacacttccgctcttttcagcaattgtctatatacgtgcatagcatcatttttttcttcgaagcaaatttcaatcacttttgtccccccttttatccccgctctaaaggactgtatctatacgttacaaatcctataagagtccgtcccgcgtgaatttcactcttagtagaatcacatttcctatcgttagaaaatccactcaatatggcttgctaattttatatatattaagggagggagaaaaaaatgatacaagctactatgaatttttattgtatactttacttatcaataaaagggggtatctgaatgtttgaatataaattcgtaaaagtcgaattacattgggggttcactcgctcaaaaccagctgaagactaccaagaaattattcaagaacatgctagagatggctggaggttcgtacagattgttgcccctacgtttggcagttctggacaacctgaatatttcgatctcatattcgaaaagaaaatatcactataatacaaaaaaagagcaagctgagaagcttactcttttacttatgacgacggtttttcccaccaattggaactggtttcgctaaatatttaattctttccataatacgtgctgctttcatttcttcagcctcaccacgctgcgtatacgttaaatggtgttccagttgtttaaaatcaaaattagacgtaaagaacgtcggtaagttttctaacatacggaattgcaagattgcaccaagcacatcgtcacgcacaaagcttgacatcgcttctgccccgatatcgtctaacattaaaacttgtacgcgtttaaccgcatcaatcttttcaccaatcgaattatcttgaattgaacttttaatttcacgtaaaaattccgggaagtatacgagcatcgaacttattttctttcgagcaagctcgttcgctattgctcctaaaaggtacgtttttcctacaccaaatttaccgtacaaatataaaccttgtgcttttttacctggttcatatgtacttaaaaattcattcgctgcaccaattgcatcgatacgtgcatttaaatcagaagggtctaagttttccatagttgcctgcaaaatatccgttggcatatatacactttgaacgagtttttcatatttctttctctcgtcatgcgctacttttctaacgcagcgatcgtattgaatatcaatcatcttcccttgaataacaagctttggctcataaccttgtagcatatttttacatgaacctaaatccggacaatccacgcaacctacactttgtccaatatattcatataacttcacaagactgcgctcaatcatagaagtcgttacttcacccttatgttcgtctataaattctttcacccgcggatgcgccattacttctgcctttagtacttcatatctatttttaaagttttcattttccattaattttgcaaatgaattttgaatatgctccattttctcacctcaaagagcgttcattctcttctattaatcacgcttatatttttttaacacttcttctagtcgttttctttcatcttctagcgtacttgcatctttttctacacttgtatctttcttctctgtttctttctcttgttctttcggctcttcttccttaagccaatctggcaccatttctttccgcaccgttttcttcgccgtacggccttttttcttcgtctcagcccactcttgatattgacggttctcttctttcgctaacgccatcgcgtccgctactgtaccgacctttttacgtgcccaatgcccagcaatcttctcgacatacgttttcgcaagtttcatatctgagcgtagcataacgtaataaataagtacattcacaactcctggtgtcaatttttgattaatcatgacatcttcaacgatctgcaagtccgctttcgttgcctctgcaccaccagaaatctctttcaatagttgttttggcgagatttcctctagctgctttattaacatctcctcttgcgatgaaggctctttctctttcatcgtacgtgcagcatgaggctgtactctttcacttaataccggtaatgcttgaccattttcaaattgataccaatcgcgcgctccttttctaagcctttccgtatcaattgtttgcatctctgtcactgcaccaagaacgatattttgcatcgataacacatctacaccatacacgtaagcaagtgttataacgcagtctctcacttgatctgtaatcgcctttttaggaacaagagcggacaatccatctacaaataaagagaaatcaaagaaatcattccaaactttcggagcgtctcccttctcgttacttggcatagttgtcgtttttggaatacgaaggtcttcttgcgcatgctcaagctgtcctggattaaacgaaccaaacacatcattgaaagaacgcgtaacattttcataagaagcaaaatcaaattcttcttctaagaaatattgctttacttgattatattttgtccggctcaatcgattgtataaaaagatacttaaaacaatatcatcaaaaaactgcttcggagataaaggtggttgcaactcatatatgaacattcgaatatctttttctttcttaatatataccttcaatagcccaattgcctctaactttactcgttcctcatatatttcaggaagttgcatttgcatagtcaccataagggaatgatgcgtattctcttttccaaatacacgatcttgctctagctctccccatagtgtcatgtataagctaaaagctctactacctattaacggctgatacaacatcgttaacacttttcggtcgtaattgtgcagtagccctttcgcacttactttataacgatcaatcggcaatagctccatccatgactgtttttccattcttgcttttcctttctctcatccaatctatcctctacttcattcgttctatcttcattatataaattcttagtgaaaaagagctattagcttgcgcttctagctctcttatcctattatttacggtatgtaaagagaataaaatacaacttctactctctttctttttgcagtatatcttttaattcttcaataaatacatttaaatctttaaattgacgatatacagaagcaaaacgtacgtaagcaacatcatcaatatcgcgaagttcttccatgacaatttcaccaatcatatcacttttcacttctgatatacctaaattacgcagttcacgttccacgctttgtgttacttcttctaattgtcttaaagatactggtcttttttcacacgctttaattaaaccacgtaaaatcttttctttattaaactcttctcgtgtgccttctttttttacaacgataagaggtgactcttctaccctttcaaaggtcgtaaagcgacttaagcagctttcacactctctccttcttcgaatagagcgcccctcgtctaccggacgcgaatctaacactcttgtaccattatgagaacaggatggacaacgcaatacattcactcctttacactatactctttatttttctctactcacttcacctaaaatatatatacaatattatataactcattctaactctcttaccactttaagtttcagcgcatcactttatcatctcatccttaaaaataagatggtatatagagcactacctcatttgcaagaatccaatttattcaactaacgagtacgttatatttttccttttttataaactaaaaaagaggtgcattatacacctctttacattttaaatcaattatgttcttttttaaagagcttttgtttctctctgcttaatttcgaagctaccagttcctcgaggaagctcgatgctctcacgcgttttcgcgtttaaaccttctgcaatatattctgcagcaacatttggatcaatacgatccccacaagtataaacatcaatacttgcgtaaccgtgctccggaaagctatgaattgttaaatgtgattccgagataattactactccacttacaccttgtggtgcaaatttatggaaagcaacctcacgcacttcagcaccagcttttagtgctgcatccacaaataattgttcaatatacggcatgtcattcagtttgtcgaaatcgcaatcccaaagttcagcaatcacgtgacgacccatcgtatccatagtatccattctacagttcccccttgtaaatttattctaactgttcgaattgaaaactaatttgcaatttggcttgctccactaccacgggggaaagttagtccagagaggtcctaaccctttaagtagtgactacgtacctcagctcttaagtttacgagtgttagtatactttgtttattttcattttgcaacaacagttttttcgattttctgtcatattttcctctttacttttccctaaaaaaaataaacgattcacaaatgcagtaatcacaacgcttcgtggtatgtccacttttttaaatatacttatataatttttttccttttcagaaaaaattaaaaaaagagggcaaatgttgccttgccctctcctcccttattcacttaaatgtgttgcacattttcttgtttcgctaactcttcaacaactaacgttacaagatctacaacacgacgagagtagccccactcgttatcataccaagcaagtactttcactttacgatcacccattaccattgtagataaaccatcaataatagctgagtgtgtatttgtattaaagtcgatagatactaaaggctcttcgctgaattctacaataccttttaacgcaccgtttgcaacagttttgaatgcatcgttaatggcttcaactgtcacatcgcgttttacatctactactaaatcaacaagagacacgtttggtgttggtacacgaagtgccataccatgaagttttccgtttaaatgtggaagaacttttgctagcgctttcgcagcacctgtcgttgtcggaatgattgattgtccgcaagcacgtgctcttcttaaatctttatgtgggttatcaatatttttttggtcatttgtataggcgtgaactgtcgtcattaaaccgttttcaattccaaactgctcatctaacaccttcacaacaggcgctaaacagtttgttgtacaagatgcatttgaaataacagtatgttttgtaatatctaattggtcttcgttcacaccaactacaattgttacatcttcatttttaccaggcgctgttaaaattacttttttcgctccagcttcaacgtgaagaattgctttttcttttgaattaaatttaccagttgcttcaattacaacttcaacacctaaatctgtccaaggcaattcctttggatcgcggttgtttaaaaggcgaatcattttcccatcaactaataagtgatcttcaaatgcttctactgttccgtcaaacttgccatgaactgtatcatatttaattaagtgtgctaacgtttcagatggatagcttgcattgattgctacaatttcgaatgcgctttcttttattgcttgacgaaataccattctcccaatacgtccaaatccattaattgccacacgagtcataatatgttatcccccttgaatgcgttatactatttatctccaatcccaataatagtataacacaaaaaggggatatgtcactaagcattttcattaatttcacaattttttagtcaataatgttccacttctttaaaattacctgcaattgtgttttcgttcccataattgtgccatcattatttatcacttcatctgcatttttcactttttcttctaacggcatttgagattgaatacgagctgttgcttcttcttctgaaaagttatttcgtttcattaaacgttctaattgcgtatgcggcttaaccgctacaactaaaattcggtcaacgagacttgttaatttgctttcaaataagagaggaatatctaacacaaccgcttgcataccttcttttatgtacatttccttttgcctattcatttcctcacgcactgcaggatgaacaattttatttaactccaatcgtttttcttcattatagaaaacgacacttcctagttttggacgatctagttctccatcttcttgtaacacttccgttccaaatacttctactattttgttatatgctggttttcctcgctctacaacttctcgtgcaataatatctgcatcaataactggtatgctcagttcacgaaacatttgagacactgtactttttccacttgcaatgcctcctgttaatccaattactactgtcatcataatcctcctcataataaaaggcgcgaaactaatgttccacgcccatacttacattttccaaattccaataataatgagtaatactccaggcaggaatgtaaatttttgtaaccacttcatattcgataaaaccgttccaagtttcattccaataaataaaaacaaagaactcataattgcaactaatatcgccatcatagcgggtacataccctaataaagatgcaccaattccggcaccaaatgagtctacagaaagagcgataccaagaagcaatgcttctcctgcagaaatggttcctgatttatcaaaatctgctacagtcggtttccgtaaaatttgaatcactagccctagcgaggcaatctctaatttccagaccttctcctcttgcttcggttcttcttttttctcacttcgaaaaaattgatataatacccaaatccctattccaataagaacaagcccaccgatacgcgttgcgataacaggtgaaaatactttcgcgatcatatgtccaattcccattgaaacaagcataacagccgctgaacacattccgataattataattgatcttagtggaattcttacgcttcttaaaccatatgttagccctacactacagctatccaagcttaatgtaaaagctaataaaataagagataaataaaggtacatcggtaagctcctcccttatacatagctctgctgtatgtatatgacaaatgcctatccgatgttatctcttttctatattctaggctgacaaattgggcagtaatgcgttcctcgcccgccaacaactgttttttctaatatcgtgccacaagttacgcacggctctccttttttcccatatacatttaggagttcttggaacgaaccaatttgcccttgtgagttgatatacgtccgaattgtacttccgccacgctttactgcttcgcctagcgttgtaacggtagcctcataaattcgctcaatttcttctactgttaaagacgaagcttctcgttccggatgaatttgagaacggaataaaacttcatctacatatatatttccaagccctactaaaagacgctgatccagtagcacaacttttattttacgatttgtcttttgtaatctttcttgtaaatactgcggtgtcatttcaggatcaaatggctccggacctaagtccgcaagaggcatttggttcatttcttcacctttcttaaagagatgcatcgtaccaaactttctcacatctttataatgtaattccgttccatctgtaaataagaaacggacgtgcgtatgtttatcaatcggctcatcctcttgatgtagtaaaaacttaccttccatacgcaaatgtgaaacaataacataattcgttacatataaaagcaaaaactttcctcttcgctttatattttcaatcttctcgccttttagcatttctttaaagatttctgcatcatccggtcgtttcactatttttggataagtaacaataacatcttcaatcgtttttcctgttacaagattttcaagtgtccgtctgacgttttcaacctctggtaattcaggcatttcatcacttccttattttgcgtcgtaccaagttggaccgtaagaataatcaactttcagcggaactgcaagttcaattgcatgctccattacttcaggtacaagcttctctaatttttcaatttcttcttttggcgcttcaaatatcaattcatcgtgtacttgcagaagaagacgtgcttgtaatccttcttcttctaaacgatccgccataataatcatcgcttttttaataatatctgcggcagtaccttgaattggtgtattcatcgctgtacgctcagcgaagctacgtaaattgaaattacgactcgtaatttctggaatataacggcgacgatttaataatgtagccacatatcctttttgtttcgcatcttttacgatgtcctccatgtattcttgtacaccagggaaactttctaaatacttttcaataaattccgctgctgcttttcttgtaattcctaagttttgtgaaagaccataatcactaataccatatacaattccgaaattaacagctttcgcttgtcgtctcatatttgaagttacttcatcttttttaacgccaaatacatccatagctgttttcgtatgaatatccatatcatgttggaatgcttcaactagccctttatcatttgcaatatgagctaatacacgcagttcgatttgtgagtaatcagccgcatacataatccatccttcttctgacggaacaaatgcctgacgaatctttcttccttcttctaatcgaattgggatattttgcaagttcggatccgttgaacttaatcgacctgtttgcgttaacacttgattaaagcgagtatgaattttagatgaatcttcatgtacaactttcagcaaaccttcaatgtaagttgaatttagtttccctaattgacgataatgtaaaatatttggaataatttcatggtgattcataagcttatctagtacatcagctgacgtagaataacctgttttcgtctttttaataaccggcaagtttaagttctcaaacagaataacaccaagctgcttcggtgaattaatattaaattctgttcccgcaagcttataaatttcctgttccatttcctttaatctacccgcaagttcttctcccatattacgaagacgctctgtatcaacttttacaccctttacttccatatcagctaatacacgtgcaagcggcaattctaactctgtaaacagttcatattgctcattcttctttaactcttcaacgaatgtttgctttacatcatataatacatgcactttacgagccacatgctccgctactacctctaactttggaacagcacgcttcgcaccttttccgtaaacttcttcatcagatttcacagcatgcgtttctttcattttcgctacagtacggaagtctttatccgtatcagctggatcaagtaaataagcagcgattaatagatcaaagtcaatcccttgcatatctatcccattccatttcagtgcaacgattgcacgcttcgcatcaaatgtatgctttctcatttctccatctgcaagccactctttaaaagcatctgacttaagagcaatgtctgtctgaataaagtaacatccattttcattttgaataccgaaaccttgaatgtctgctttatgatagttatcttcttgtacttcaacgataagcgcactatcttgctgaagcatttcttctgtaacttcttccacaatatcaaatgtaatatcatctaattcagctggagcagtttcttctggcgtaacgcctaatttatttaaaagggatgtaaatcctaaactctcgaacattggaatgacatcacttgcttcatatcctttatacgccatatcatccacacgaactgtaatcggcgcatctgtaataatagttgcaagatccttactcataagagcttgttctttattttcttccagtttttcttttaatttcttcccacttacttgatctatattttcatacaccgcttcaaccgttccaaactgtgttaacaatttaattgccgttttttcaccaactcctggtacacccggtatattatctgactggtctcccattaaacctttcatatcgataatttgctttggtgataagctgtatttttcaaataaagcttctttcgtatattcatccacttctgtaatcccttttcgcggaatacatacaagcgtgttatcagaaacaagttgaagtaaatctttatctcctgaaataacttttacacttgccccttgctcactcgcttctttcgctaacgttcccatgatgtcatccgcttcataattttctaattcataacgcggtacattgaacgcatccagcatctcacgaataaacgggaactgctctgataattcaggtggagtcttttgacgccctcctttatactcactatacgttttatgacggaacgttgttttgcctgcatcaaacgccactaacatatgagttggcttttcttcctctaatattctcattaacatcattgtaaaaccgtaaattgcgttcgtatgtatacctttgtcgttatttaaaagcggtagtgcaaagaatgcacgatacgcgatattattaccatctactaatacgacctttttttccaaaattgaaacctccccatacaaatttgaaatgatttttttcacagaaaaaaaccgttcctttcctctctctatattaacatgactaatagagagaagaaaaataacggctattttctttcatatataaaacagacttatattggcataaagggaagtgacgagaacagcttaactattctcgtccaaaattactccttggatgaaggggttttcatgtattatattaacagagctttattaatatttaattaagccattgttaatatattgtaaacatccttcatcctatttttcagttgctgatttcggtaaaacaactgtaaacgttgttccttctccaacttcactatctactgtaatcgtaccttgatgcgcctcaactaaatgctttacgatcgacaatccaaggccggtaccaccagtatttctacttcttgctttatccacccggtagaaacgttcaaaaatacgcggaatttcctctttactaataccaattccagtatccgatacttttatataagcattatatttatcttccgctaactctactgaaacaacgcctccagccggtgtatatacgattgcgttattaattaaattaataaagatttgtttcaaacgacttggatctccaataacagaggcacgttttaatacattcacttgtaaagagatttctttttctcctgctttattatcaagcaccatatgaatatcttcaagcagccccttcatgtcaacggttcccatatttaatttaaatccttgttgttcgatcttcgacaaatctaataaatcttcaattaatccttgcatgcgctcactttcttttaaaataatgtgcaagaaatgttcgcagaattttttattatccatcgctccgtctaagagtgtttctgaaaaacctttaatagaagtaatcggtgtctttaattcatgagaaacattcgctaaaaagtcttttctcatttgttctaatttctttaactctgttatgtcatggaatacgagaacaatccctttccattcatggtttgtcccgataataggcgctccatatacttcgaaatgcttccgttcaattccaagtggtaataacatttgtttacgcactttcacttctgtcataaagatttcttctacaagctcaataatttctgtatgatgaaacgattcataatataagcgatctaaatattcttcatctgttacgtggaaagtttccttataagagcggtttacaaggtttatatatcctcggctatcaattaaaatcattccgcttcccatattttcaattaacgtatgcagacgatcttgctgcatttcttgttcaagtgtcatctcttgtaaatttcgtgctaaaatattaatcgctttactcagcattcctgtttcatccgaatgactttcgtatgcacgtgctttataattaccctttgccaattcaattgcaactttcgtaaccgattcaattggcctaatatattgccctgtaattttcatacctaaaaatacaactacgagacaagcaatgacaaatccgataattaataatccccacgttttttgatgtacgtctcttaaaggatcaattatacttttcaccaaaatgtatccttgttttccttctacatcttgaacgaacaccgcatgataaaattcattctttcgatccgtttctttcgtaattactttacttcgttgttttgccacttccgaagaaagttctttaatcgtctctggactaaatgccaattcttgtccttttctatattgaactttctttttttcatccaaaaatacgatagaagctggtattttttcttctaacttttcaaatacgtatggattttttaagacattatcaaaaccttgctcttctgctaacgtcgcaacatactccgtctcttttaccattctctctttagcatgatctatatagtagttttcaaacacagtttctagtaataaacctagtccaactaaaataaatacaataagagaaacaaatgtaaaaagaagcctggaacgaaatttattcattcccttttggctcctctaatttatatcctaaaccacgtatcgttttaatgtacgtcggttttttcgtattttgttcaattttatcgcgcaaatggctaatatgaacatcaacaattcgtgtatcaccagcaaaatcataattccatacagcacttaataattgatcacgtgtcaacacgcgacttttatttttcgcaagatacacaagtagttcaaattcttttggtgttaattcaagctttcttccttggaaataagcctcataaaactccggtaaaattttaagttctgcaattgtgatgctatcttcatctggcgcttctgcaacttgttcttcttgttgtaatttcgtacggcgcaaaatcgccttcacacgagcaactacttctcttggactaaatggctttgtcatataatcatctgccccaagttcaaggcctagcaccttatcaaactcatcatcttttgccgttaacattaaaatcggcgtcataacgcgctgcaatcgtaattctttacacacttccataccatccattttcggaagcattaaatctaatataattaaatctgggcgttctgttgtcgctttttgaagcgccatttctccatccatcgctgttataacttcaaacccagcttgttgtaaattaaattcgattaaagttaagataaattcctcatcatcaactactaaaatacgattgttcattcttttcctccaagttatagacttgaaaccttcttcatcctagtattttccccgttattctcatcatactagaaaacaaggtccctctcaatataattgtctattcatggattcggattgtgctattgttattcctaaaaacaattacgttcgcctcaattatgttttgttatccatactttatatacttccatatcgttattaaattctacttccgtatgaatattgagttctcgattttgcgctaagagaaaagataaagcatacgctattttataatctggtgtttcatatccatcaaatactctcccgtacatttcattcacaaacccgtctgcccacacttcagcttctcttaccgtttcaaagatcgcgtcttctcttttccacctcacctaaaaaatcactcctttaattgacttcaattaccgataataatattattaatcttaatatataaattaataatattcggaggtctattatgcgactaatactatccattctatctttagcaatcacatgtatccttgcttttaacgctcctagctgggatacgattaaaacgggttgctcagaatttgctgaagggttcaaagaagggtttttcaactaaaaatagcgctagcatccttattaaaggtatgctagcgctatttttattttcatcttttaaaagttatctaatgctttttccataatggaaacagatttataaggtggcgttactgttaatgaaccctttacaacagtttctcctttttcatcatgagcagatacaagcatatcaattgtatgttcctcctcagaaacagccacaacttcaaagtggatttgtaacgtttcataatggtgaacatgtttcacgaatgtaaggtcctttctcgtaatatgacttcctggacccggtaaatatttcgtaaccgccgttgtaatcattcccgttagcataatgcttggtacaatcggcttttcatacggagtttgggatgcgtaatcatgctgaatatataatggattggcatcattcgttaaccctaagtacaataacaaatctttatcctcaattttttcagtgatagataatttctctcctactgtaatttcatccattttacgaccaatttgaacttttttctttaacatgttacaaccccctccgattttttcaccttattatcctactaaaagcgataccttatccgaaatttactatgatgagggcaatgtatagtataaatctacagtttcattataggatattacaaatgatagcgttttcatattatttcaaaaaaacaattcggtaaatagtagaaaaagattcggaatcccgaatctttttcactactattcaattattaaacaagaactttcattacgttacgtacagattctacagagcgatctaacgcttctttttcatctgcaagaagttctaattcaataattttttcaattccgttaccacctagaattactggtacccctaagtaaaggtcactataaccatactcaccttcaaggtacgcaatagccggtaatacacggcgttgatcttttaagattgcttctgtcatttcaactaaagaagctgctggtgcgtaatatgcactaccgtttcctaataagcctacaatctcaccgccacctttacgtgtacgttctacgattgcttctaaacgctctttcggaattaacgtttctaacggaataccgcctgcatatgaataacgcacaagaggtaccatgtcgtcaccgtgtccaccaagaacaaatcctgtaatatcttttacagaaagatttaattcttgtgcgatgaatgtacggaaacgagctgtatctaatacacccgattgaccgataacacgctctttcgggaatcctgcttctttaaatacagaatatgtcattgcatcaactggatttgttaacacaacaataattgcatttggtgaatgttttgcaatgtcgcgcgtaatacttttcataattttagagtttgttgctactaagtcatcacggctcataccaggcttacgtgcaatacctgctgtaataacgacaacgtcagaatcagcagtatctgcgtaatcagatgttccaataatgttagcatcaaaaccttgtactgggctcgcttctaacatatctaacgctttcccttttgttggattttccagttgtggaatgtccactaatacaacatctgccagttctttttgtgctaataagaatgccgttgttgctcctgtaaatcctgcaccgatgactgaaaccttcttgcgtttgattgtcataatttacccccccgctttaattatgcgtttttgattatcgctacatccatgtttttaataagttcattagcgaactcagaacatttcacttctgttgcaccttccattaagcgtgcgaaatcataagttactacttttgaagcaattgttttctcaacagaagcagttactaatttcgcagcttcgttccatcctaagtgttctaataataatacacctgaaagaagaacagaagatgggtttactttatctaaacctgcatattttggagctgtaccgtgtgtagcttcaaagatagcatgtccagtcacatagttaatgtttgcaccaggtgcaataccaattccacctacttgtgcagcaagtgcatcagagatatagtcaccatttaagttcattgttgcaacaacatcgaactcacgtggacgagttaaaatttgttgtaagaagatgtctgcaatagaatcttttacgatgatttttccagccacttcagcgtctgccatcgctttattcgctgcatctttaccatctttttcaacgatacgatcgtattcagcccaagtaaatactttgtcgccgaattcttgttccgctacttcgtaaccccagtttttgaaagcaccttctgtaaatttcataatgtttcctttatgaactaatgtaacagaagagcgtttttcgttaattgcatattgaattgcagcacgaacaagacgctttgtcccttcttctgaaatcggcttaataccaataccagatgtttctgggaagcggattttattaacacccattgcttcttttaagaaagcaagaactttttctgcttctggagatccttgtgcatattcaattccagcataaatgtcttctgtattttcacggaaaataaccatatcagtatcttccggacgttttacaggtgaaggaacaccttcaaaataacgaactggacgtagacatacatataaatctaattcttgacgaagtgctacgtttagagaacgaataccaccgccaactggagttgtaagtggacctttaatcgcgattaaatattcacgaattaagtttaaagtttcttctggtaaccactcgcctgtttggttgaatgctttttcccctgcaagcacttctttccaaacgattttcttctcaccatcataagctttttcaactgctgcttctagtacgcgagatgcagccgcccaaatatcaggaccaattccatctccctcgataaatggaataatcggattgtttggtacattcataacaccattagttacagtaattttttcacctgtcgtcaatgtgataacccccatgtttgaaatttcatatgtatgaaactgagggaataacccctcagttcaaaccgttagtcaaattaaaatattctaatcattacatctttccgaaaaaatcagacttttgaaagcgtattttcactatcaaaatagtgttattcgcttatcgttgtgcaattggaacatacacttgatgcgttggtccattataatcagcacgcggacgaattaaacggttgttttcatattgttctagaatatgagctaaccagcctgacatacggctaattgcaaaaataggtgtaaataagtcatggtcaattcctaaacaatggtatacagaagctgaatagaaatcaacatttggtggaagacctttttcttttgttacaatgtcttcaattttgatagacatattataccatttctcttctcctaaaagcacgcataatctcttagacatttcacgtaagtgttttgcacgtggatcaccctgctcatacacacggtggccaaagcccatgattttcactttattttgaagagcattatgaatatatgactctacattttcttcttcaccaatctcagttaacatcttcattacattttcatttgccccaccgtgaagaggaccttttaatgcaccgattgctgctgtaataccagaatatacatctgaaagtgtagctacgcaaacacgtgcagtaaatgtagaagcgtttaactcatgatctgcatgaagtacaagcgccttatcaaaagcttcaatttcaacttcatttggctcgcgatcatttaacatgtacaagaagtttgcagctaatgataaatcctttcttggctcaacaacatctaaacctttacggattctcgcgtaagcagcaactaaagttccgacttgcgcctgtaatttaaccgctttcaaataattggacttttcatccataatttcagcgctctcatcgtataatgatagcatggaaattgcagttcgtaaaacagacatcggatgtgcaatttttaaatctacttgtttcaaatatgttaaaatctcacctggaactttatagtattcagatacaatttcattaaattccgctagttctttttcattaggaagcttgcggtgccataataagtacactacttcttcaaacgtagcattctcagctaaatcatcaatattatacccaacataagttaatgtatcatcaataatagagctcacagatgatgttgttgctactaccccttctaaacctcgaataacagtcatgacattctctccttttcctgaaaattctcccaatcttgctccttatatctatttgctccccttatgaattatgaacgcccgttcactctttaggcaagcaaaatgcacgatcatgcaaatttgttgcgatgttcccctcttattgtccattgtttacatggaaagcatgagcgtgaatgtctccccgaatcctcacgctcaaaacaacaagttagtgaggaaaatacattccgaagagttttatgataaaaacaacataaaacaatatcattataaaattgttttatgttgtttttattttatctggtgtaaagtctctgctgttatgtaacttttcaaagtttctaatcctattataaacaattatctgacttttgtgaacagaaagaattcaaaaattttatattactataaaattccttatttaaacatctgtataatactcataaccgcataggcaattccagccccaattaacggaccaacagcaaccccattaaatagcgcaaccgctataattgtcccaaaaacaagcgcagttgtaatgtgaggatccgtcgtcaacaattgtacgccgcctttcgctaacaaagcgaccgctacacctgaagctaaagcaatccacgcataataagatttcgccgcttctccaagttgtttaaaacctatttcccctgtcgcaatcggtacgagcaccgctattgtaatgaccgttacacctaggttaattcctttcgtttgtaaataaggaaagaccttatctcctaaaaacgtaaacttcaataaaaataacacaccaatagctacagtaagcgattggtttttagcaataagtcctataataagtagtatgaataaaaataacgttgactgactaatcatgtttgcacttcctttctgaaaataatgaactcatttccaaacaaaaatacctttaaacctatcgttatacatgctatatcgatgcctattcaacatgaattacttcattttttatgtattttaaaatgacaaactgagactttcaccatcaaaatttaagcatgtatacattttaaaaaacgggcgtctcttctttcttttctaattagaaacaggtaaaataaaaagaagagaaaatgaagtttttaccatatagtagaagcatcaacaccaagctttcacagtcactcatatactgaaaaagcaggaaaaatccatcattccactataacataaagtgaaactttaatcagtggggcattttccactgattattagccttcaccaatcgggcttttacgggcagtttatctccagctaactcctttgatccagccgcacttcgggtaggagatttactgcccgttaatgcggggtaaagtgaaactttaatcagtggagcacactcgttataagttgaacgaattaggataatccaaattggaatgggaggtatacatctttgaaccgaaacttactatatatgatattgcgactcatatttgtcattgtagcaacggtagctgggttctatgtattactatacatgtcagggcttatctatccttttattatcgcttttgcatttgcttatttgattaatcctgtcgtcaatttccttaatcaaaaactacaatttcctcgcgcactagcagtactcgttagcttaattctcgtatttggagctatcgttggacttgttacatatcttgtgactgaagcaatatctgccacaacatacttactacaacttgttacagtaaagtttccagatatcgttacattcgctcagcaatttgcacttaatcatattatgcctctctacgatgatttaatctctaaatttaatcatcttggagaaccacagcgctatacaattacacaaaacattcaaaacttaggaacagaagcaacaacacaaatgaaagaacttttaaccgccattataagcgggttaacgaatttcattagtgcactgccaacaactttaactgttcttgtattcattttattagccactttcttcattagttacgattggcaccgtcttgctcagaaagcaagaaaattgctaccgaatcgtgtacatggctatggaaaaactatttttgtcgacttaagaaaagctttgtttggttttgtgaaagcacaacttacactcgtatctatgacaaccgtcattgtactaatcggacttttaatattacgcgtaccatacgccattactattgcgattattacaggagttgtagatttactaccatacttaggaacaggcgcagtcttcgttccatgggttatatacgtatttttcactggcgataccgcattcgccattggtcttctcattttatacatcgtcgtgattgtccaaagacaaattatggagccgaaagtactttcatctaacatcggtctcgatccattagcaacactcgtcgctctatttgtcggctttaaactttttggctttttaggattaatcatcggcccagtcaccttagtactacttaatacattacacaaagctaatgtcttccatgacttgtggaaatatattaaaggttcaccttcaaaataatagtttctaattcatacacaacaaaaaacttacatgtaatcagtgggaatttcccactgattattccttgtacttatttttcatactcattacataaaacaagagaattgcactcaaaaaagataattctcttgtttttttgcatgaaaaacgcatatttcgtggtgtttttacatatttattctatttattttataattatcatttacatttattactttttatgtaaatgaataaatatacaaaatagcataaaacaagacttcaactaacaatctccgcctttttatatgaattttttacaccaatcgttcctttatatgagaaagcaaaaatttaattcagcagcgttccctccatcttattcatctaaattaatagcactaaaaaatcacaagtttaatcgaagtacacacaagaattcaaacgaaaattatatagcacatataataagcgaacgttttgttcatccccactcatcattcgccccacaccagacacttacgagcagcccagctttgagatagaaattccaccccacaaatagcgcggcaaagcaaagcttcaaccagaaagttcctctcctcttacaacacaaaaaatagcacttagatttctacaatctaagtgctatttctgaataataatagtagagttctttctaaatttccattccatccacttcataacaaacggcttcaataaagctctcgtaatagggatcacgcagataaaccctagcacatctgtcacatacccaggaagcactaagagaatacctcctacaaatacaaaaataccatctagtaccgcctcacctggcatttcccctctattcaacttagattgaatctctccaagcactttaaacccttgtcttttcgccaaatacacacctacaacacctgtaaatacaatcatagcgaacgtagaccataaacctattacatgacttgatccaattaagaccgtaatctcaatcgccggtattaaaataaacaagaatagtaaccacttcatagttctacacctctctcacaactcacttttaacgtcctcacaacgcctatatacatcatatgaaatatagatactctttcatattaaaacacataacaaacagcttttaaaagcaattctaggcgctttaagctaattctatctcgtttttgtgtaaaaaaaagagaaggactccgatccttctctccgtattacttatagcacttccgcatgtccattataaacaattccgcgtgctgcatcaactgttacttcttggccattttttaaagttgctgttacgcagtttacaccaacgataacaggaataccgattgatacgcctacaacagctgcatggcttgttaagccaccttcttctacaactaaagccgcagctttttcgattgcaggaatcatatctttatcagtgcttgttgtaacaaggatatcaccttcgtttacgttcgctacagcttcagcagctgtttttgctacaactactttaccttttgcagctttacgaccaattccttgtcctttagcaatttcttcaccaacaacgtggattttcattaagtttgttgtaccagtttcagcaactggtacacccgcagtaatcactacagtatctccaagtccaattagacccgcatccatgcctgtttgaattgctgtatctaacatttcgtcagttgaagctgcgcgcttctcagccataaatgcttgtacaccccaaacaagtgcaagacgacgtcctacttgctcgtcagatgttacagctacgattggagattttggacggtatttagagatcattttcgcagtatatccactttctgttggagctacgattgcagctacatcaagagcaagtgctgtatgcgcaacagattggctaattgcatctgtaattgttggagtgaactctttaatacgttttttgaacatatcttcatattgtaatgatttttcaacacgtaccgcaatgttagccatcattgttactgcttctaccggatattgtccagcagctgtttcacctgaaagcatgattgcatctgtaccatcgaagattgcgttagctacgtcacttgcttccgcacgagttggacgtgggttacgttgcatagaatctaacatttgtgttgcagtaataaccggtttacctaacacgttacattttttaattagacgtttttgtactaacggtacttcttctggtggaatttctacacccatatcaccacgagctaccattaaaccgtcagaaacttctaagattgaatcgatgttgtcgataccttcttggttttcgatttttggtacgatttggatgtattgagcgttatgctcttctaataattcacggatttctaatacgtcagacgctttacgtacgaatgaagctgcaatgaaatcaactttttgctcgataccgaagatgatatcttttacgtctttttcagtgataccaggaagcttaatgcttacgtttggtacgttaacaccttttttattttttacagttccgctgttaagaacttttgtacggatgtttccatcagctttttcgattacttctagttcgataagaccgtcatcgattagaatacgagaacctgggtctacatcgtcataaagaccagcataagatacagagaacttctctgcagtacctaatacttgctcagtagaaagaactacctctgcacctgttacaagctcagcttgtccgtctacgaagtcgtgagtacggatttctggaccttttgtatcaagtaagataccaactgttttaccagttttctttgaagcttcacgaatgtttttaatacgagctccgtgctcttcatggctaccatgagagaagtttaaacgagcaacgttcatacctgcttcgattaattgctctaatttttcaatactttcactagcaggacctatagtacatacaattttagttttacgcatattgcacctccgaaaattatgaaaccgttcccaaatatctgacattacgccgattagatggataattctttagataattgatacatatctttatcgattgtatgcttttgagctaacgcttcgataatgtcatgatcaacaagtttattatcttgaatacctacacaacgtccacctttaccagcaattaacaactcaactgctcttgcaccaagacgacttgctaatacacggtcttgtgcacttggtgatccaccacgttgtacgtgacctaatacagttacacgagtatcaaagtttgttgcttcttcaatgtgcttaccgatgtcaattgcacttccaacaccttcagctacaatgataatactgtgttttttaccacgttcgctaccacgttttagacgagcgattacatcatccatgtcatactcttcttctggaattaagattgtttctgcaccatcagctaaaccagcccataatgcgatatctccagcatgacgtcccattacttcgataacatatgtacgttcatgagatgtagctgtatcacggattttatcaattgcatcaataacagtgtttaaagctgtatcgaaaccaattgtgaagtctgttccagggatatcattgtcgattgtacctggtacaccaacacatgggaatccttgttcagttaattttttagcgccttggtaagaaccatctccaccaataacaacaagtccttcgataccatgtttctttaattgctcgataccttttagtcgtacttctgggtctttaaactcaggacatcttgctgtatataatttcgtaccaccgcggtggataatatcgccaacagaaccaagttctaatttttcaatgtgaccagaaattaatccagcgtatccatggtaaataccatatacttcaatatcatggaaaatcgctttacgaacaactgcacgaatggcagcattcataccaggtgaatctccaccacttgttaatacaccaatacgtttcatttgtactcacctcataaagattatttgccttataataaaataacacgaaaaaatataaaaacacaatggagaagatgtgtcttttcataataaaaacgtgcattcgcgaagaggaacgcacgcttttcttattttatcccaatggaagcgtttgaaaacgaaacttgcccaattttcatatatttttcataacgtttttcgattaattcatctttcgaaattccgtttaattgttcaaaagtttttctaattattaagtctatattttctgactgtttcaaaatattacggtgagctccaccttttgtctctggaataatttcatcaattacacctaattctttcaaatctgctgctgtaattttcattgcctctgcagcttcctttgcttttcctgcatctttccaaagaattgccgctgcaccctctggtgtaataacagaataagtggaattttctagcatatgaatgtaatctcctactccaaggcctagcgcaccaccactaccgccttcaccgataacgatacaaataactggtaccgttaaacctgccatctcaaataggttgcgggcaatagcttcactttgtccacgttcttcagctgctttaccaggataagctcccttcgtatcgatgaaacaaataataggacgattaaacttttccgcttgtttcatgagacgcagtgcttttcgatatccttctggatgaggcattccaaagttacggcgaatattttctttcgtatcttttccgcgctgatgcccaattacagttacaggcatccctttatatttcgcaatgccgccgacaatcgctgcatcatcgccaaatagacgatctccatgacattcgaaaaaatcagtaaataagtgctcaatataatcgagcgttgtcggtcgttctgcatgacgagcaatttgaacacggtcccatacttttagattgccgtatatatcttcctctaaattttctagcttttcttccaaaatacgaatctcctcactgaagtccatctggctgtttttcgtatagtctttcagttcacgaatcttatttcttagctcaacaactggtttttcaaattctagctctgccatacagccacttcccctccttgatgaacttctaaaatcttacgaagcgattctctcatatcatcacgatgcaccaccgcatctaattgaccatgatctagtaagaattctgccgtttggaaatcttccggtagtttctcacgcaccgtttgttcaattacacgtctaccagcaaatccgataagtgcacctggttctgcaagattataatcaccaagtgaagcgaaactcgctgaaaccccgcccgtcgttgggtgagtcataacagaaataaataatcctcctgcattactatgctttttcaaagctacgcttgtttttgccatttgcattaaacttaatataccttcttgcatacgggcaccacccgaagcagtaaagataataaatggaacttgtaagtcgtacgccttttcaaccgcacgggcgattttttctcctactacagagcccatgctccccattcgaaaacgagaatccattactgcaacaacaacaagcatgtcatcaattgttccttcaccagttacaaccgcttcgttcaattcagtcttcttacgatcgctctctagtttctcttcataacctggaaactcgagtggatttaatgaaaccatttctttgtcatactcacggaatgacccttcgtccaatatactatcaagacgttcccatgcattcataggatgatgatatccacaattcacacatacttttaaattttttagaagttctttcgtatacatgatttttttacattccggacattttgtcataacgccatctggcacatcttttcgtacttgttctgaaggtattgcagcgtactttttctttttcacgaataaatctcttagcacaatttgacccccttcgttgagagctaaggttagcgtaagaagaaaatggggctaacaccaaagtttgatgttagccttatcttctcaatctgtctaataacctcactctttacgtttaactttaaccgctacgcggtagaatgtttgtcataacgtgtcatggtcatttcgacaaattttatacattacgagtgaaactgtatattctctactaattcatcgtaaatttttagtgcatcattttcttgtttttcttccaaagtagcgtaaagctttctatacatatcgatagaatctcttgaaactttacaagaaagcgttgatacgtaatcatttacgatcatccaaatgcgatatagtaaataattatcgacttgttcaataagtgttttaaagaacgtttgatgaagcgttgggattgagttttcatttccttcaagtacttggtgtaatttacttagcactttagaaaacgtttctttcggtaaattacatacaattcgaatcatatctttctcgagtaatcgtttcgtttgtaataaatcacgaattgttttctcatcttgcaataagaacggagcaattaattgtacaagaccgttatcataaaagtttcgaataaacgtcccttcaccacgtctcgtttcaatcaatcctaccagttctaaagcacgcaatgcttctcttacagaggaacgtcctacgtttaagcgtgaacttaactcacgctcagacggcaaacgatcccccgccaccaatccatcctcttccataatggaacggattttttttacaatttcgagatatacttttgtatttgatgatgtcaatggaatttcctcgcttattctttaccaatcagcgctaattgttttgttttttcagcgatctcatttggatctacttgacggcgagctactcctgtctccattgctgcttttgcaacgtaagccgctacttgaggcgctacacgcgcgtcaaatggtgccggaatgatatagtctgcatttaactcatcttctgctacaagctcagcaatagcctgtacagctgccatcttcatttcttcgttaatttgtgtcgcatgtacgtcaagtgcaccgcggaaaataccagggaacgccagtacattatttacttggttcgggaagtcagaacgacctgttccaacaacagctgcgcccgctgcttttgccaattctggcataatttctggaactggattcgccattgcaaaaataatcgcatcgtcattcattgtacgaaccatctcttctgttaatgcaccttctgcagatacaccaatgaatacgtctgcaccttgtacaacatcagctaaagaaccttctatacgattcttatttgtatattttgcaacttcatccttcaccggattcatacctgtaggacgaccatcatagattgcccctttacggtcacacataataatgtcgcgtacaccatagcgatataaaagtttaataattgcaatacctgctgcacctgcgccatttgcgacaactttaatgtcagacattttctttccaactaatttcagtgcatttacaagacctgctactgttacaatagctgttccgtgttgatcatcatggaagataggaatatttgtttcttttttcaaacgctcttcaataatgaagcagtttggtgctgcgatatcttctaagttaacgccgccaaaagttggctccattaattttacagtttcaacaattttatctacatcgtttgtatttaaggcaattgggaatgcatctacaccagcaaagctcttgaataatacagctttaccttccattactggaagagatgcttcaggtccaatgttaccaagaccaagtacagctgttccatctgtcacaactgctaccatatttcccttcatcgtatattcatataccttacttttatcgtcataaatttctttacaaggttctgcaacccctggagaatatgcaagacttaaatcttttgcattttctacttttacttttgatacagtttctaattttccttgatgcactttatgcatgtgaagtgcttcttcacgaagtgttgacaaactatccactctcctcaaattattcttgctgatatcaatttctccaagtggtctgaccacgaacactactactataataatcgaagtgtagggaaattgtccattatattttcacaactacattttcttccccgacaatttcacgaagtgctcctaaacattcttcacttggatgaatcgataaactccgagataattgtaccattttatgttccttttcataataaattagtactttcgcaaaacctgaatagtcgaacaatattttcgtaacccgatttaaaagctttttctcatactgagatggcaatttcacgtaaacagatgcgtctttcttttcttcataaacatccatttcctctagcggatatagtccatttacaatccattgcagcttatgatttcttagctcaatcgtaccgtcaactaaaacaattgctccttcttgcaacttatccgagaaatgtatatacgtttccgggaagaggaccgcttccatttcatcattttgatcacagaatgtaataaatgccatcttttgaaactttttcgtacgaatcactctaacacttgttatatacacaatagctctttgtacttttttcttgtgtcgcatcgcctgagcgagagatggaatttctaattcttttgctaacttcacatattgcgctgtcggataacttgataaataaaagccaagtacttctttctctttatttagttgttcaataaaagatagctcttctccttgtacatattttgattttggaacagcatctcctaaatcacgtgcgagattcgcgtactctaacgcccctttaatacttttccataaattcgttctcgaaacaccaaaatcatcaaaacatcccgaccagacgaaagcttctaaattacgctccgttacgaactttgacggcatacggagacaaaattcaaataaatcttcgaacatttttttctctcgttcttctaataatgccgtcactgtagccattccaatatttcggatcgaaagtaaactgtaacgtatcgcattcccttctatttggaagttataaccacttctctgaagagacggcggcaaaacgtgaaaacctttccgcttcgtttctcgtatatactgtacaattttatcttcatttccaattgcgcttgataataatgccgtcataaattccagcgtatagttcgctttcaaataggcaagctgatatccgatcatactgtaagctacagcgtgacttcggttaaaaccgtaattcgcaaatcttacaattaaatcataaattttttcagcagacgtctcatcatatccatttcgcaaacatccctggacgaaatgcttacgttcctgatctaaaatatcacgattttttttactcactgcacggcgcagtaaatctgcttctccaagcgaaaaccctgctaacttcgatgcaatttgcataatttgttcttggtatacaatgacgccgtatgttctttctaaaattggctttaaatccggatgtaaatattcgatttttctttttccatgtttcgattcaataaaagtcggtatctgttccatcggtcctggtctgtataacgagttaacagctacgatatcttcaaactcattcggttttaacccgcgaagtacatttcgcataccgcctgactcaagctggaatacacctgttgtatctcctctccctaataattggaatgtcttttcatcttgaagaggtaagtttcttatatcgatttctttcccagttttgttcgcgataaattttataatattttcaagtaacgttaaattacgtaatcctaaaaagtccatcttaagcaacccaagttcttctagcgcatcggctggatattgcgtaacataaacatcgttatgtccttcttgaattgctacactgcctgttagcggttcttgactcataataacaccagccgcatgaatagacgtatgacgtggtaaaccttctacacgttttgcgatttcaaacacacgctcatgcaaaagattcccttgtataaactcacgaagtgattgtgattcttcatatgcatcttttaacgttataccaagctttgatgggataagttttgaaaatatatcaatatctcgcggcggaagccccattacgcgggcaatgtctctaattgccgcttttgctgcaagcgtaccaaacgttacaatttgcgcaacacggagctgaccgtatttatctttcacatagcgaatcatctcatcacgtcttacgtctggaaaatcaatatcaatatcaggaagcgtcacacgttcaggatttaaaaacctttcaaataatagatcgtattcaattggatcaatatctgtaatttctaatacgtatgaaacgagtgaaccagctgccgatccacgacctggtcctgttagaatatgattttcatgtgcatacttcataaaatcccatacgatgaggaaataatcactaaatcccatacgagaaataacatttaattcatgatccaaacgctttatatgcacttctttcggttcaccatatcgtttccgcaaaccttcttcacaaacacgacgcaagtatatatcactcgtttcattagacggaacaggaaacttcggaagttgatttacatggaacggtatttctacttggcaacgctctgcaatttttattgtattttggattgcttccggcgcatgggaaaatagtgcttccatttcatccgatgactttaaataatactgatctgttttcagcctcggcctatctggatcagtcattttcgttccactttcaacagatagtaaacattcgtgaacaagcgcgtcactttgattgatatagcgcacatcatttgttgcaacgactggaatattaaccctactaataaattcaggtagtttctcttgtaaaagcaactcatcttgaattgcatgatgctgcaaactcatataaaaatggccgaacatattttgatacgtgcgagctacttcttcagcctgactctcattgtcttctagtaataattgctcaatttcgccatctttacctggcgaaatagcaattaatcctttcgcataatgcgcaagccacttcttaggaataccttctttggactttgtcataatactgctagaaatctttaataaattttggtagcctatttcattctcagcaagtaatacaagcggataagacctttcttcttcttcactaaaaatagaagcggttaatccaataacaggctgtataccatgtttcttacatgctttataaaacggaataacaccatacataacattttcatccgtaatagctagcgatgaaaaaccaagttctttcgccctgactacaagctcatcaattttacaagcactttttaataaactaaaaacggtttgacattgtaaatgcacaaacttcactgttgtaccctctctttacctatttgactacttttattataggtgatgaggaaagcggaaatcaaaacatacttcttatactttgtccatatatatgaagaagaaaggggaatgacgatggatgtaagagaacatacttttttctctctgcttattattagttattttattgcctttggggttatacttggcggttcattaattggtggatttggtgcgtttcttatcggaaaaccagctctaacttacattaatcaattcgcccaaaatttaagaatttgggcactcgttgcagcaatcggcggaacattcgataccttttatagctttgaaagaagtttctttggcggagatatgaaagatatcgtaaaacaaattctccttatttttttcgcaactggtggtatgcaaacaggtctcattattattaaatggctaacgcaggaacatgtatgagagtaccaagtgccaatacagcaaaaagatggtacttagtattagctggtgctgctgttggaggcgtgttgagctggtttatttttttgtacatatacggtgtttttcaacaagaacaagctagtaaaatagcagaacaaagagaaattatagaaaaacaagaagcaaagctccacgtccttctcgaagatcaagaaaaattgaacactgaaaataaacggctcttaaccattcaagagattaaaataaaacttatcaatcgagaaaaatacgatttagacaatcttacactcgaaaatatgactacatctattcataatgatctccagcatcttttaacgaaaaacattcaaagtatcgcaaaaaataaagacctactaaaaaaggtaatcgaaaataaaacatacaaacattacgatcgcctataccgttttaaagtcgatacaatatcttttgatacagtgcttgaaattagcattactatagagaaagaaaaataaagaaggagggctttagcgccgctccttcttttcgttctaacatatagtcttttatttacaaatctcacgtaaatcagcaaaaagacgatccgcttcttcccaagaagatgccttggcaccagaagccatcggatgccctccgccgttatattgcattgccaatttgtttataactggtccttttgaacgaagacgaacacgaattacgtcatcttcctctaaaaatagaacccacgcctttaatccatcaatattgccaagcgctccaacaacaccagatgcttcagaaggaagtacatcaaactcttctaatacttctttcgttaatttaatgtaagctgctccttcttctaccatcgtaaagttttgtaaaatataaccgtttaaacgagcaattttttcttttgtcttatacatttcattgtataaatctgtgaatttcacacccatatcaacaagctcacttacgtaacgaagtgtttttgctgtcgtatttgggaataagaaacgacctgtatctccaacaattcctgctaaaataaggcgagctgcttcttttgttatttttaatcctttatcttttccatagttataaaactcataaatcatttcacttgtagaactcgctgtcgtgtctacccacgtaatatctccatatggatcttcatttggatgatgatcaattttaattaacatcttcccttttgtatagcgttgatcgtcaacccgttcttgattcgcagtatcacaaacaataacaagcgcattttcgtatacactatcttcaatatcatccattactcgtaagtatgctagtgacggttcattgtacccaaccgtataaatatttttctctggaaacgattcttgtagaattgtaccaagaccaccctgtgaacctaacgcatctgggtccggacgcacgtggcgatgaataataattgtatcaaactctttaattgctcctaaaatttgctcatgcatatgtataatctcctttttaatcaacttcttcactttatcctccattataacggaaagtatttcattcatgcgaacaattgctttataataaaagttagaaagtttagatatttctttttcttttctattatttttcacaaagcgatgggagtgttcactatgccagtattagtcttctgtattatcatctcatttatgttgtacctcttttacaaaacaaaatactttcgtacaaaccgcccaatggagaaaggttggctctcaggaaaatccgcaatggcactcggttcattcgttttatttttcgggataaaccaattctttttagaactttcaaccgctcgtattatcgttggtgttttattcgttctatttggtagtgcaagtgtatttaacgggtttcgccaatacaaacatttcttgccattagcagttaaagaagccgaagtctatgaagcaacataaaaaagcatcaatattgtgatgcttttttacgtcccttaactttcaaaatcatatatgcaacaaacgcagatggtatattaaatgggttaccttgtacatgaaaatgtagttgttcttctccaaaagacattttttcatatagctctcgctgagataatcctgtcttttcctttttttcatgtaaaccttgtaaatataaatattggatcggtatcattacaagaaagtaaaatagtgcgatactaccaaaaaagagtacggctgacgacataatgcataccacctttcagaattccattttcttacaatataatcataacacaatatacaactaaattgaattactattctgtcttttcttacgttacttttccactccactccatacatatttcactaaaactcccatctaaaatcatgcctttcaaatttaaaacaacaaaaaaagatggaacaaatcaaaacgatttgttccatctttttatttatcgattaactgcaccataagtaatgcctttccaacaacattaccttcatgatgcacctctacatcgaccttaccaaatttacgcccaatttctaatactttcggatgaacagatacaacattatcaatttgaaccggctttacgaaataaatcgttaagttttcaacaattaaatcgcttttcttttgcgcacgaatgacgcgatttgtcgcttctgtcacaattgttgcaaatacaccgtacgataacgttccgattgagttcgtcatttgcggcgtcaccgaaaattgatatagatgctcattcttcgcttctttcggcgtcataaattgattcgttacaatatcatcaatggtttctccaacttgtggctgccgttgaatcatttgcagtgcctgaagtacatcttgacggctaataataccttgtagtttatttccttcatcaacaacaggaagtaactcaataccttcccacaccatcatacgtgccgcagctgcgacagacattttaccgttcactgtaattgggtgttttgtcatcactttatcaattggtgtttctttcgctacaccgatcatatcttttgaagtcacgattcctagcactttgttactttcatcaacaatcggataccttccgtgcatcgtctcttcattataggcatgccattgctgcactgtatcatttggctttaaatataacgtttcttcaattggcgttaaaatatcttcaacgagtacaatttctttcttaataagctgatcgtaaatcgcacggttaattaacgttgcaactgtaaaggtatcgtaactacttgaaataatcggcagttttaattcatctgctaatttcttcacatgatcttccgtatcaaatccgcccgtaattaatacagcggctccagtttctaacgctaattgatgtgcgttcgtacggttaccgacaataagtaagttcccagcttctgtatagcgcatcatcgcttctaatttcattgccccgattacgaatttatttaacgttttatgtagtccttctctgcctccaagtacttgaccgtcgacaatgttaacgacttctgcatatgtcagtttttcgatattctctttcttcttttgttcaattcgaattgttccgacacgttcaattgtactaacataccctttattttctgcatctttaattgcacggtaagcggtcccttcacttacactcaaatctttcgcaatttgtcttacagaaattttatggcctactggcaggctattaatatgttctaaaatttggttatgcttggtagccaaatggtttcaccatactttcttttccctaaattcttcatgtgttgtactttcagtatactatattttcaaaactgttacactctctctttgcatacctgtactattttttttataacaaaatgactcttacattccaccagtcattctattacaacaatgtaatgctattgtcatctcattcgatagttcgcacacttgattacctatacaattaagacaagaaataaaacaaaggagcgaacacatgatgaaaaaacttttagaggttgtaggtgctgtatttttagctttcgtagatgggaaaaaagttacaatggaattgaatgaaacacctgagcagccacgtaccaaaagaaaagaatcaccaaaacaaatacaagtattaaaagctgtcctacacacgtaaaaacccttcacttttcttttcaaatgaagggtttcttttctatagtgtaatactttctccagcttctaatactttccctgtacaattttgtagcttttctacaaattgatatggatcttgttcaataactgggaacgtattgtaatgcatcggtacaacagttttcgcattaatccattttgccgctagtacagcatcttctggtcccattgtgaaattatcaccaattggtaaaaatgctagatcaactttatttaattccccaattaacttcatatcagagaatagtgcagtatctcctgcgtggtatacagttctctcttctgctgtaaataaaatacctgctggcatacctgtatatgtaatcgtcttattttcttcatcaatataactagagccgtggaatgcttgtgtaaacttcacttttccgaagtcaaattcatgtgaaccaccaatatgcatcgggtgtgtatttacaccttgccaacttaaaaatgttgctagttcaaatggcgctacaacaactgcattatttttcttcgcaagctctactgtatctccaacatgatcaccgtgtccatgcgataaaaggattgcatccacttttacatcttcagcttttaaatctgttttcggattacctgttaaaaacgggtcaattaaaataactttttcattcgcctcaattttcacaactgaatgtccatgataagatactttcattattacattcctcccctattcacattctcactttttattctacatgatttttcaattccctgtcttttctaacatctatttacttgtcataacactttcttccgagttaaagttatatttgtaattaaatatctcgggggtgccaatcgatgaatgctagattagaaaatttaatgcaatggctaaaagaaaaaaacgtagaagctgcgttcttaacttctacaccgaacgtcttctacatgacaaacttccactgtgaaccacacgaaagattacttggtatgtttgtattccaagaaaaagaacctattttaatttgccctaaaatggaagaaggtcaagcgcgtaacgctggctgggcacatgaaattatcggatttactgatactgacagaccatgggatatgattgcaaaagcaattaaagaccgcggcatcaatgcaaatgcagttgcaattgaaaaagaacatttaaacgtagagcgctacgaagaattaacgaaattattcccaaatgcagctttcaaatcagctgaggagaaagttcgcgaacttcgtttaattaaagatgaaaaagaactttctattttacgcgaagcagctaaaatggcggactatgctgttgaagttggtgtaaatgcaattaaagaaaaccgcagcgagctagaagtattagcaattattgaacacgaattaaaaacaaaaggcatacataaaatgtcatttgatacgatggtattagcaggtgcgaactctgctcttccacacggtattcctggcgcaaacaaaatgaaacgcggcgatttcgtactatttgatttaggcgtaatcattgatggttattgctctgatattacacgtacagtagcattcggtgaaatttctgaagagcaaactcgcatttacaacactgtacttgctggacaactacaagcagttgaagcatgtaaaccaggtgttacacttggcgcaatcgacaacgctgctcgttctgttatcgcagatgcaggttacggtgacttcttcccacaccgcctgggtcacggacttggaattagcgtacacgaatatccagatgtaaaagctggcaacgagtctccattaaaagaaggtatggtcttcacaatcgagccaggtatttacgtaccaaacgtaggtggcgttcgtattgaagatgatatttacatcacaaaagacggatcagaaattttaacgaaattcccgaaagaattacaatttgtaaaataataaaaaaggcagcgggattgctgcctttttctatttctctactatttcaaatttagcaccatcttctcctcatacttatcatcccatttaatcacaacttctataggttcatctttagagataggcgcgcaacttacacaagaagacttcatttcaatctttgctcctctatgaacttctgacgtttgtgtcattgtactaaaggctccattaatagcaatctctaagtttttaaattctgtctttccatccccgcccttatattgaaacgtaaacatcccatcttcactgtcatccttaatatgccctttatattgtccagtccaacttttgctctcgctagaaaaagtaacatacgaaatggaacagcttcctaaaaagaaaatactaatgaaaaagaataatgctctcttcataatgcccccctccattcaaaagcatttatttattgtctatttcttcctcttattatactattaaaatacagaattttctaaaataggtggtttatatgttacaacaacagttagaagaaattcgtaataatcattacgtaatggatacaattaacatggattctttaatttccaatatgcttaaacatatcggtgttaccgatagctatttaagggacaaacttatttgctctactttttaccatctcatcaaaaaggactacctttcacacacacaattacagaaactattattagaaagcatcagtgacaaatatttattgtataagattcattcggatgacgaagatgcggtatttacccgtgcatttacaacattattaattgcactcattattgatgccgatacaaatcataatttcttatcacaggctgatcttttacatgtaaaagatcgattagtgttatatatgaacaacgagcatgatttccgcggatatgtgcaagaccacggctgggcacatagtatcgctcacgcttctgatacatttgaggcgcttgttcgtagtcctaaactggaaactttatattacgaagaaatattacaaactttattaaacaaagtttgtgtccattctatttactacaaatatgaagaagacgaacgtctcgtttatccgattgtcgcaatgctacaaaatggtctaaaggaagaggtactcctattagcccttcatgaattagtagctcaattacccgtcaaaaaacagacattacatactgaatcgtacgagtacctatacggaaatataaaatctttcttacgtagtttgtttttccgactacgcacactgtctatatgtgaagaaaccgaatgcaaaattgaaaaattgctgcaagaccttccaaaatattattaaaaaaagaaggccacttagaaagtgccttcttctatttcactaatatttaattgaaatttcacgatccaaactgagaaaaggtggacaagaagcgcaaacgccatacatgctccgcttaaaaaagttagtataggatgcgaatacacgtgccccaatccataggatatcgccacgaaaaacattgttatgtaaatataaattgctccatgtatttgcctcatataaacctccttttcccatattataacataagttttctgattattcacattaattactcgtaatcaatatttctcaactgttacacctcttacagcagccttaatatacggtgacccttgtaaactttgtaaatcctctgttttcctgttacgactacaccgtatattggtaagtcttttgttttggtgttttttatttctttatcccgcattaacaggcagtaagacccccacatcaaaattcagcggaagcaaagaagttaggggggggcggactgctcgtaaaagcccgattggtgagggctgataatcagtaggggatgccccccccactgattaaagtttcactttatagtttatcctaaaatattctcgatatccctctttattttcacttaaagatatccaaatacagcttttataaatttttccataataaaaagcacatttattttgatgtgctcttcacatataatttagtaaaatatgaaccatttttttgaaacaaaaactcccactcatctctccccatactatcgttatgacttagttgccataataattgaacgaggataaaatcccagcttttcataaaatgatacagcttcatttccatacactactgttaattcaatttcatctatctttttcactttaaaccattccactgcactattcattaatttcaaaccaaatccgtttcttcggtatttttcatcaacaaataaaacttcaatctttccgcttacgcttttactatacgctatacaaaatcctaatatattatctgtttctgactcaatcaataattcaattctatattctccgtactttgagttctttttataattttcaatacgttcctcaaatgtcattcttgggtaatcgccagaaaaatattttgatttattattatgatattcatgcaatttatttaaggattctcttattatctctatttcatcgagagtgatatatttattactaattctcatcctatagcatctccaataatatatatttcagcaaaaaaataagactgttttttgttcacaaaatattactctattactccatcgcttccctcacaacatcttgaatcataacaacttctgttttcatatcaatagacattgcttcttcatcaatacattcataccaaaacgctaagtgctttttatcgatttcataatgagaattttcgacaagagccccgccttctccttgcacagaataccaatataagtactcttctccatctcttatttcccggaaaattgtctcaacgtacatcttttcgtcgtttaatgtcaaaaggacttctttcatattgtcattaagaagctgcatccattcatctactcgatgactcttaccaggcttaactttaaatctcgttaattccacattcatttttattcccccgttttcttacttacaaacaatctatattctatcggattatgaaaacttaatttactagctagtttttgcgaaggaatattgtctacataacaatcccagcacggtgtaatatcattttgcatgcaatgctcaacgaaccgtgtcgcaacagcttgagctaatccttttccttgatatgcttcatgtgttgcgatatctatttcagcataaccattcccgctaaatattgagacacattcagctacaattatcccatcttgttctatacaaaatccaaaaccactattcaaaaacgtttcttttgatccccaatatcctttgtagtactcctctgtaaattcactgcttcgttctatatcacttttatcaatacgcttcactgcatatgtatttttatttgcatcttgtgttcgctcttcaaagatttctctttggaatttcattcgtggcatattccgaagtacattactaaaacacccttcaatcatcatttcccactcttcacttgaagcgaatagtgtaaatctcttctctgttttttcaatagccatttttaaatacatcaataaatcttcattataattttgatcatccgtatgaccaaataaataatagataccgttaactgtacgaattaatcctgctgttaacttctcgttggcaaaaacctcaccatctaccatttgatcacataccgcataagcaaatgtcgtcgttcttgtattactttccaaaatcggaatgatttttctatactcggctacagataattttttcataattgctccactataatcgtatcagcctctatatgttcaaaacaaagatttaccgtcctctttaatgctctcgttctatgaatcgtacatgctggaattaaaatagaatcatttggctttaaaaccgccgtttctccatcttcaaaatcaataagtaactctccctctagcacaataaataattcatccgaattagaatgatagtgccaatcatattcaccagtaaatacagcgatgcgtaagcaatgactgtttatgtttgaaacgacgaagtttttatgttgatcttgaatgtcttttgttaattctattaagttcacagtttccatatttcatcccatccttccattagtcgttcttctgaaaaaccaacttagtctccaccacctccgcaatctcctccgccatcacttgagctgctacaatcgttgctactgtagtcaccgaatccacttgatgagcttgaattggatgaagattttttgcttctttttctatcttttttactttcatgactaggccaaaccttatcaaataatataaagaataagattccttctaccataacaagcataacgccaaaaataccttcaataacattaggtgttatccccaaacatttaaccatcccacataaaaacacacaaaaaatcacatacaagaacatacaaatatatcgaaatactttttctatcataaggactactttttgtgaaaaaggtatgttctgctcctgttttttctttatgtacttttgtctctttgcttgctttttcttcctctttttactccccattgaatcccctctttttattatataattctaaattatcataataaaaaatgatttacaccaataaataacaattattcacatgttatttctccataaaaaaagaccctcctcataaaggaaggtctcgaatgtatttctattatgataaagcaggagctttttcaagaagctctttcgcatcagcgtattgtaagccgtgcgcttctgcaactgcttcgaatgttacatagccatctaatgtgttaataccttttagtaatgcagtgttgcctaagcaagcatctttgtaacctttgttcgcaatttgtactgcatatggtactgttacgtttgttaatgcaagagttgacgtacgtggaactgcacctggcatattagcaactgcataatgaacaacgccgtgtttttcgtaagttgggttgtcatgagttgtaatacgatcagttgtttcgaaaataccaccttggtcaatcgcgatatctacaacgacagaacctggttccattgattgaatcatttcttcagttacaagttttggcgcttttgcacctggaattaatactgctccaataacaaggtcagattctttaacagcttctgcaatgttgtatggattagacattaatgtttttacttggttaccgaaaatatcatctaattgacgaagacgttctgcacttaagtcaatgattgttacatctgcacctaaacctactgcaatcttagctgcgtttgtaccagcttgaccaccgccgatgattgttactttgccgcgttttacccctggaacgcctgcaagtaaaatacctttaccacctttgtttttctcaaggaattgtgcaccgatttgtgcagacatacgaccagctacttcactcataggtgcaagtaatggtaaagaacgattgtctaattgtactgtttcgtatgcgattgatgcaactttgttatcgattaatgctttcgttaattctggttctggagctaagtgtaagtatgtgaataaaattaaaccttcacggaaatagccgtattcacttgctactggctcttttaccttcataaccatatcttgattccatgcttcttcagcagtttctacaagtttcgcaccagcttgtacgtattcttcatccgtaaagccagatcctaaacctgctcctttttgaacaaaaacttcatgaccattttgtactaaatgtactgctcccgctggcgtcattgccacacggttttcattgtttttaatttctgttggaataccgatacgcatgattagttcccccttgagttatgaaatgacccctgaatcatttttttaaagcgctttctacgctcttatattttaacataatatctcaatatttgacaaaaaaataacacgagttttccgatagatttaattttatattaaaggacagtattatccgcacctctcagcacaatggataaactgtccaattattcgaaacttcatcttattttattctatcgatgtctatgaataacatccactgcaccagtcacttcaataattgtaccggtaatcatatcggaatcgtcctcacataaaaacgaaatggttcttgcaatatcttcacctgttccagatctaccaatcggtgtgttatgctctttcagctgacgtgcttcttgaatagttgcctctttcatctcgcctataatatcaccaggacataccatgttcgcagtaataccatactccgcttcttcataagcaactgttttcgttaatgaaacaagtcctactttcgctgcggcaaaagctgaacgataaatccatcccggtgcactatccgccccttgaaatccgtaattaataatacggccaaagttctgttttctcatgaccgggacgacaagttttaataaatgaaataccgctgttaaattcccctgaatcatttcattccattcatcttcttcataatcaactaacttttttcgttcaaatacatatggaccagcattattaattaaaaagtcaattttgccaaaatggctcatcgcttcttctactattttatgtaaatcttcctttttcgtgacatccgcttgcacgaattgtagacgctcttccacatctttatatgtttctttcatcgtttccatagccgtggtatcgctatggtacgttactgttactgaatagcctttagccaataacttttctgttacttgctttcctaaacctttcgtaccggctgtaatgagcgcatgtctcacaaaactgcccccttttaaattgctatacttcatatgtaacaagttctcgctccaattacaactaaaatgaattgaaacagagttttcaaaattctgtaacgtttctggcaagcacgttaccaaaatttgttttataattaagttgtaaacagttataaaacagattgggaggaatttactatgaataatacatatacaaatattttaatcgcggtggatggttctaaagaagcagaaaaagcctttaaaaaagcaattcaagtcgcaaagcgcaacaatgcaacattaacaattgctcatatcgttgatgtaaaagcatactcagcagtagaagcttatagccgtgcaattgctgaacgggcaaatctatttgcagaagacttattagaagactacaaaaaaactgcgcttgaagctggtcttgaaaaaattgaaactgtattagaattcggtaatcctaaatcaaaaatttcaaaagaaatcgctccaaaccataaagtagatttaattatgtgtggtgcgactggtttaaatgctgttgagcgtttcctaattggtagcgtctctgaacatattattcgctatgcgaaatgcgatgtccttgttgttcgtggtgatgaagagcaaggtgagctttaatttatagataaaacaccaagtccacataggcttggtgtttttcatttcataaacttcactataaacacaagacatgctacgacaacaacggtaattgccaacacataaggcggaagaaacttcaaagaccataacgccatcatgattgtcgcgatcgttaagtacgtttgctttgcaccctctgtcatttttttacgaagtaagaagacgtacaaatagccgattggcggcgtaatgaagcaaagaacatatatgatttttgattttaaataccatttttgttctccaagtttctttatatctccttcaattctcttactctcttgttctttcgcttcttctacaagcggattttcctcttctcctcgcttttctttcatataaggaagaaagtgcataaaaaaaatagtatgcgaatacgaacgctccaaatccaatatttaatctttctaatggaatatgttcactaaaaaaagcagcagtaagcactaaagacaaacagtatgtcatcatccaaaatgaatgttttctctttttccgttccatttctttttcaccttgtatatcttttcttttcgaaatccatatagaaataaagcaatctactacaaatagagcaaaaataaatatcgcaacgtgtactgtttctaaatcctcaaatgaaaagatatttgggaatgcaacgtgtaatacaattagcgtgtacaaaattaaccctataaaataaatacgtctcatttttcatccctttcttatttcctaacattacgttaacatacattttttagaaatagacggacaaaatatatatgtgtaaaaaaggaggatgcaacatggatgattctgaacgtattattttagatgtgaatgggaaagaactcgaaatgctagatacgattcgtactcattttaaagagaaacatggcgttgaactaagtaacggtgcattacttagagatttgatggatattgagtatattcgaattacggaagaacgacataagtatgattaaaagaaaaacgactgcaggcgaatgccatcagtcgttttctttctttatttaagctcttgatgcttcccgcccataccaccttgctcattgctatcttggtgtacagttagtttatttgttttcgtatcttttaaaactctatatgtatatgattcatttggttcatctttaaactgcacattcattccatacgaatccattttgctataaaaggccggttttatatataaaatatcactttctttatatcctttatcttgcaaatgccacatcgttgcgataatcgcttcttctcgcttttctttttcaccaacatacatatatttgtccaaaagaaacactttagcatttgcaattaaactaattaccagtacaatgataaacactatttttttcatagacttcccctaaattgttattttttactatattgtaacttaaatattattaaaaaacaaagtacgccagactttactagactggcgtacttcccaactcaattcttaataaattctttcgttaaccccttcgccttctccaaagcgtttttgatttgttcaaatcctgttccacccgaactattacgacgctttacagccgcatatggtgaaagaacttcatacaaatcctcttcaaataaagagctcatttctttatatgtttcaagcgagacatctaataaataaattcctttttgtgtgcaatatagcactaacttcccaacaatttcatgagcttgacggaatggtagtcctttgtttgctaaatagtcggcaatttctgttgcattggagaaatcttgcgtcacagcttgccccattttttctttgtttacagtcatcgtttcaagcatgcccgccataatatgaaggcatccttctactgtttttactgtatcaaacattccttctttatcttcttgcaagtctttattgtaagcgagcggtaatcctttcattactgtaagtaaactgaataaattaccgtatactctgcctgttttaccacggattagttccgccatatccgggtttttcttttgcggcataatgctgcttccagttgcgtattgatcgctcatttcaataaattgaaactcttggctactccataaaataagttcttcacaaaagcgcgataagtgcatcataagcatagatgagttacttaaaaactccaagatgaaatcacgatcgcttactgcatctaaactattttcatatattccattaaatccaagaagctccgcactatattctcggtcaatcgggaatgtcgtcccagctagcgctcctgctcctaatggggagatattaatacgctttaacgaatcttcataacgatttacatcacgctctaacatccaaaagtaagcgagaatatgatgagcaaatgaaatcggctgagcacgttgcaaatgcgtatagccaggcataatcgtttcaatattattttctgcttgatgaacaagaacagtttgcaattgttttgtagcttttataatatgttctaccttttcttttaaatacaaatgcatatctgtcgctacttgatcattacgacttcggccagtgtgaagttttcctcctacttcgccaatttgttcaattaacattttttcgatgtttaaatgaatatcctctgcttctactaaaaattgtagcttattctcttttgcttctttcaataaatattgaagacctacctttattttctctgcttcttctttcgtaacgatgccttgctttgctagcatcgttacgtgtgcaatactcccgtttatatcttgatttactaattgttgatcgaaagagatggatgctccaaactcttcaacccacgcttccgcttcttcagtaaaacgtccgccccaaagtttgctcacgcttccaccttcttttgattcacttggctgtatactttcgtcggtaaaccaaataatgaaatgaatccaactgctgcatcatgattaaattcgtcctgggcagtatatgttgctaatttttcatcgtataaagagtattcagatttacgtccttctacaatcgcatgacctttaaataatttcacacgcactgtacctgttacattcttttgcgtttcttgtaaaaatgcatgaagcgcttgttttaaaggtgagaaccataaaccgttataaataagttctgttattttctgttcaatcactggtttaaaatgcgctacttcttttacgtgtgttaaatcttccaactctttatgcgcagtgattaacgtcattgctgctgggcattcgtatacttcacgagatttaataccgacaagacgattttctacgtgatcaatacgtccaacgccgtgttttccagcaagcgcatttaacgttttaattaattctgcaagtgaatatgcagtgccatttaaagtagtcggtacgcccgcttcaaatccgatttctacaaactctggtttattcggtgtatcttctaacgctaatgtcatctcatatgcatcttctggcggcgctgcccatggatcttctaaaattccacattcgttgctgcgtccccataagttttgatcgattgaaaacgggctatctaaattaatcggaattggtacatcgttttcttttgcatatgcaatttcttcttcacgtgaccatttccattcacgtacaggcgcaatcacttctaagtaaggatttaatgcttggatagaaacttcaaaacgaacttggtcatttccttttcctgtacatccgtgtgcaactgcagttgcgccttcttgttctgcgatttctactaatttcttcgcaataagcggacgagataatgcagagacaagagggtattttccttcgtataatgtgtgtgcttgcatcgccatcaatgcatattcgtttgcaaattcttcttgaacgtcaatcatatatgatttaattgcacctactgaaagtgccttttcttttacaaatgctaagtctttaccttcccctaagtctaaacaaagcgcgataatatcataattcttctcttgtaaccatttaattgcaacggaagtatcaagacctccggaatatgctaatacaacttttttcttctccattttgcatcctcctaaagaataaatattcattttcttttataataattcacactttaacacctttcacaaaatgtatcaagagtcattttcaaattttttcaaacaatttcgtcgaacttctttctgtttttctgtacaatataagcaggaaaacgggggtgaacttatggaaaagtatttcttatacgatgaacatctaggaattgaaattccacatttacaagaagactgggaagaaatccccgaaaaaatgcaacatgctattttactaaaatgggaacaagttcgcgggaaaattcctgatcgtataaaagaacttgagcactatattaataaaaaacaacattatttaaataacgaagaagacttcgaagtttcttgtaaactaaattcagaaattgccgatcttgcttccatcattaatgacctttggctttggtatcgactcactcaaaatgtatctgaggggaaagcacacatgcccatcaacttaagaatttgcactacccccaagtgtcaaaaaacgttattctttctaaaaagctagctagaaaaggatcaaactctccaataaagttagtttgtctagcatctaaaataaaaattgacgtttcacgttgtttgtttcgttcagttttcaaagaactacttagtcgctcattcgcgacttccttatgttaacatcttcatttttcaatgtcaactaagttttttaatttcttttttgtcgttttctgcgtttccgcatcagcgacggttattaatatatcatgcagtatatacagggtcaatactttttataaaaaaatttcacatcccgttaaaaactgaaaaaccgctgtaaaaatccttatagcgtccattcattcttcatggcccccctcctattcatttcatatcttatccctttatcaatttacacgagagtgaaaattctaaattttatgttatattattagtataggagcgtggtgagaatgagcattaagtattcaaacaaaatcaataaaatccggacctttgcattaagtttagtatttatcggcctcttcattgcatacttaggtgtctttttccgcgaaaacattattattatgacaacgtttatgatggttggctttttagctgttatcgctagcactgtcgtttacttttggattggtatgttatctactaagactatccaaattatttgcccaagctgtgataagccaaccaaaatgctcggccgtgtcgatgcatgtatgcactgcaatcaacctttaacactagatcgagatctagaaggaaaagaatttgatgaaaagtataataagaagagttataaatcataagtatcaagggaaatacgaatttgcaacactacaaacgtttcaactcattaaaaagttgatttcttaaaaaatcaactttttaattgttttattaaatttattacacctattttttcgaaataacagtaaacatccctgtcatattaggcgaataatctttaaaatcatatttttcgtagaatgatgttttaccttgcgacgcaaacaaaccaatgaatgctttatctggagcattctgatttaagtattctactaaagtattcattattttctttccaataccattcttttgatactctggatgaaccactatatcttgaatatagaaatagatagccccatcaccaacaattctccccatgccgatgatttgattattatccttgactgttatacagtaaatcgaattttgaagtgatatttccgccacctcaaagttcatatagttagtccatcccacagaatcacataaatatttatattcttccaatgttggaatgttatttttaatctcatatttcttcaaaatgtcccctcccagaattcatttccaccaatacaaagtaaattcgacaaacttttatctaaccctccttactaacttagcactgtaaatcccgattaacctcacgctaatccttatataataaagaaagaggctgacgtatagccgtcagcctctttctttattatatattacgccttatgacactctggacaaacgccataaatttctaagcgatgactattgataacgaagcctgtcgttttcgcagcttcctcttccagcttttccaagcctccataaggaaaatcaacaatcttaccacatttttcgcaaatcacatgataatgttgacttgtaacataatcaaatctacttgaagcgtctccataagttaattcctttacaagtccaacctctttaaacacacgtaagttattatagacagttgcaacactcatatttggaaacttaccttctaatgctttataaatatcatccgctgttgggtgcgtcattgattccacaaggtactctaaaatagcatgacgctgtggagtaatgcgtacacccgtatttttcagcatttctagcgcttcttttaattcttctttgaccaccgtcatgcaccccgattctatacggattattattttataattcttataaagagtgtactccttttcttataaatcgtcaatatttctactataagtatgtagtttatttttatattcaggacttgtttttatgtatctttcccttttttcttcatatattccatagaaaaaagtgcgacataatcgcacttggaatactatcatctgaggaggtatgccctacacttccactttatgtaaggcagtaaaatatgtatagacatttgccttgtttctgcatattttatccccaatgtagatttattttatataagaaagaacatcctcaatatgtcctttcactttcactttacgccactcttttacaagttcaccgtctttattaataaggaatgtagaacgctcgattcccatatactctttcccaaagttcttttttaacttccaaacatcgtataactctgctactttatgatcttcatctactaaaagtgtaaatggcaattcatgtttctcaatgaatttcaaatgtctattcgctgaatcaggacttactccaagaataaccgtatccttctcttgaaatactccatacgcatcacgaaaatcacatgcttcagttgtacatcctggcgtcatatctttgggataaaaatagagaactacatttttaccgcggaaatcagctaggcgaacttcttctccattacttccctctaatgtgaattctggtgccatttctcctactgtaatcatagttatcactcctactcttttcctttactataacaaatgcttccttatttttcattgtctattacagacctcatcacaaaagcaaaagggagtgtatatccaattagcgcttctgcgattgcaatccatcgcccaattccaatcggagatatgtcaccatatccaacagacaataaagtaactgcgctaaaatataaacaaacttcgacgagttgaaaagaatgagcgttcaaactttctccgtcctctttcaaaactgcgaaacccatttcctctaatacaacgtaacttaatccaaatgcgattagtactgttgtatagattaaaaataatgtggccaaattatagagcgaaaaaaaacgcgttgaatccgaataggaactccataataattggacacttttcaaaatagcgattgctgcaattaatagaataaatccccataacatgtcctccacctcattttatatgtatgaggtggagaactgatttatcccttagaaacgaacaagcttctataattaattacccgcgcctcgatacctttttaccccttggttccagagggtgattgcaatcgtaaaacagataataccaacaattggcgtcgcaaatgcataactattccattctgtttttcttaaaaagtatgctgctggatatactccaacaaacgcaaacggtaaaacgaacgttaaaatgaaacgaattacacgattataaatattaacaggatagcgcccgtaattacctatgttatacataagaggcataattgaacttttcgcatccgaccaaaaaccaaggctcgccaacgtaacaaatatccctccatatacaagtgctcctcctcctaccatcaatataaataagaagaaatcataccagtaaaaagataattgtaactccacagctgcatatcccattacaacaatccctgtaatagctccaattaaagattcaagttccattctttctaatataatttgaaataggctatggatcggtcgcgttaatacacgatccatctcccctttaataatgtatcgatcattaaaatcccatatattaaagaaagctgaaaagatggcaaatggtactaaaaagaaaccataaataaagattacctcttctcgactccatcccttcaatgcttgtgtatgcccaaatacaacgagaataaatattaaattaactgcttgaagcgataaatcagaaagtaaaccaacgataaaatcgcctcgatactccaatttcgtttttatatattgacttgcatattgtaaaaataagtttatatatagcatctcatcatcccccttgtacaattagacgttttctcgccgttctccacatgagtacaattggaataataagtacaatcgcccaaatcacttgaaatactaaagcctcatacaacttactcccctgtataccttcagaaaaaatcatacttggaatataactaatagcctgaaacggtaaaaacatcattgctttttgggcccataacggataaaaactaattggtaataatagacctgaaaataaatcaataacaacgcgttttgcatacataattccactattattaaataggaaaaacgtaagcattcccgtcattaaattaatttgtgtattaataataaagctaaatattaaagataagaagaaatataaccaagtttgaaaattcgttgtaatttgcaacgaaaataataacgtaacgataaccatgcctggaatggaaaagaaggcaaaacggaatattccctcgccaagaccttgcataactttcattcccaaatagttatacggacgaattaattctacagccacacgtccttcttgaatctccatcgcaatttccctatctatattattaaaatagaaggcacgtgccatccacgcgattgcgatatacgtggtcatttgcgaaatagataaactttcaatattctcttttccgctataaattgcttgccataaaaaatagtaagcaccgatattaatcgtataaattaaaatcccgctatagtaatttgtacgatacgcaagcatcattaaaaagcgaattcgaatcatttcaatatacttacccatgcgtaataccttcttcataaatgttacgaataatttcctctgtagacacttcgttaatttttaaatctttaatttgaaatgcttgtactactttagaaataagcattgaaataataacttcttcattcggaatttttgcaacccatgcattttcctctttcgctttcgaccaaacgacatgattatctggcataaccattgataaagcctgataggaaactggtgcaacaaactgaaagtgaatttccttctctgctccccactgcgtacgaagattacttaaagaaccgtcatacataatattcccttcatccagcatgataacgcgctcacataaagcttcaatatcagtaatatcgtgtgttgttaataaaattgttgttttataacgttcattcatttcttttaaaaattcacgtattttcaatttcacaagtacatctaacccaattgttggctcatctaaaaataataacggtggattatgaattaaggctgccgctaattcacaacgcattctttgaccaagagataattttcgaactggtttatctaataaaggccctatatctaacgtttcaattacgtgctccatatgctccttatactgagcgtctgatacaccgtacactttctttaataaacgaaacgattcttgtactgcaatatcccaccaaagttgcgaacgctgtccaaaaacaacaccaattgttcttacaaattcttctctttgtttatgtgggttcattccatttactgtgatttgccctgatgtcggagttaaaatccccgtaagcattttaattgttgttgatttaccagcaccgttctcaccgatataaccaaccatttcaccttgctttacagtaaaagatacatcatttactgctggtactattttataattacgatttaataaatcgcgaaatgcaccctttaagcccggacgacttgaataggctgtaaactctttacgtaacccttgtacctcaattaccgatttcataatcggacccccctcctaaatgtcacaacgaatagtttacccaactgccttcgctatcacaaacaatacgtcttttcgaaaaacatgttagaataatacatagatttttgtaaggagatgaattgtagtgaaattcacaaagtcagaagcattacataaagaagctttagagcatatcgttggcggtgttaatagtccttctcgttcttttaaagcagttggcggcggcgctcctgttgctatggaacgtgggaaaggcgcttatttctgggatgtagacggaaataaatatatcgattatttagcagcatacggtcctattattactggacatgctcatccgcatataacaaaagcaattacaacagctgctgaaaatggggtactttatggaacaccaacagcgctagaggtaaaattcgcaaaaatgttaaaagaagcaatgcctgcattagataaagtccgtttcgtaaactctggtacagaagcagtgatgacaacgattcgtgttgctcgtgcttatacaggtcgcacaaaaatcatgaaattcgctggttgttaccacggtcattctgatttagtacttgtggcagctggatctggtccttctactttaggaactcctgactcagctggcgtaccacaaagtattgcacaagaagttattactgttccatttaataatgtagaaactttaaaagaggctttagataaatggggtcatgaagtagcagctatccttgtagaaccgatcgttggaaacttcggtattgtagagcctaaaccaggattccttgaaaaagtgaatgaacttgttcacgaagctggcgcattagtaatttatgatgaagttattactgctttccgctttatgtacggtggtgctcaagacttacttggtgtgacacctgacttaacagcgcttggtaaagttattggcggcggcttaccaatcggtgcttacggtggtaagaaagaaattatggaacaagttgctccgcttggacctgcataccaagctggtacaatggcaggaaaccctgcttctatggcatcaggtatcgcttgtctagaagtgcttcaacaagaagggctttatgagaaattagatgaacttggtgcaatgcttgaaaaaggaattttagaacaagcagcgaaacataatatcgacattacattaaaccgtctaaaaggggctttaactgtatacttcacaacaaatacaattgaagattacgatgccgcacaagatacagacggtgaaatgttcggtaaattcttcaagcttatgcttcaagaaggaattaacttagcaccttctaaatacgaggcatggttcttaactacagaacatacaaaagaagatattgaatatacaatcgaagctgtcggcagagcatttgctgccctagcagacaataaataatcccgtcattaaaaggaaaaaagaaagctcacctttcttttttccttttttctatttcataaattccgtattaatagtataattattcataattatctgttttatactcttttacagcattactatctctgtgtacaaggtgattcgcaccttaaatagtaagattattctaacttttacaagaggggggattgacggatgctcaataaaaaaaatacatggacaccgtctttatttcgagattatagaaatgcagaacatgatgcgtgtggaatcgtttccgttatggagaaacgaaaaattgctacaaaagaaaacattgacctttgcatacaatcactcgtcaaaatgaatcatagagctggtttcattaatggtgagggcgatggcatcggcattcacattgatataccaaaaacgctttggaatgaaaaactaaaaagtagcggatataatccaacgattgtggatcatccccactttatcgttggacatttttttctaaataaaaaagaagacattactgccttaaaagattatattcgtacgcaattaaacaacaaaaactttactatcattttcgaaagtgatgatgtaacaaactcagatgcactcggtccacttggtaaacaagaagaacctttattttggcaagttgcccttatcgcagaaaacgaaattacaaatattgagcaaacattattttctgtcacaataaaaatagaggaaaacgaagcaattcatgttgcttcattaagtcgtaatcatgttgtatataaagttctaggtgctggtgatacgcttgttgcctactataatgatttacaacatccgcttatcgcttcaactatgacattaggacataaccgctactctactaatacattatctaatttttttcgtgtacaaccatttagcattctcggacataatggtgaaattaacacaattgcgaaattacgcgatcaagctgaaatgattgatgtaccacttactgcaggaggcagtgactctcaagatttaaaccgcaccttagaaaccctacttgttcaatacaactacagcttatttgaagcaatggaaattctattcccaccaattattaatgaaattaaactttatgaaacacctttacaagatttatatacgtatatacgtgaagcgtggggacattttgcccaaggaccagctggcatcatttcccgttttaaagatgaagctgttttcagcgttgattcccttggattacgcccagtatggaaagtagagacagagagctcttatattttctcttctgaacctggagttgtatcaccaactaaatatgtagcagaaccaaaaccactcgctcctggagaaaaagtcggattaaaatggaatgaacaagatgaacttgttctttatgaatatgacaaatatcaaatccaagtatataaccgttttaaaaagcgaattgatactaccaattaccatttaaatttatctatccctgaaacgaaaaaaatccaagggctatgtgattctgttcaagttgaaacgaaacaatacgtcgctttcggatgggaccgagaacatattcaactccttgaacagatggcaacaaaaggcgttgagccaatacgctcacttgggcatgactcaccacttgccgcacttgatactgatagacgaaatatcgctgacttcattaaagaaagtgtagctgttgttacaaaccctgcaattgaccgtgaccgtgaaattgaacacttctctacacgtactgtacttggagagcgtccaagtttattaagcggcgcaaaacggccatttctagttgaaatgctttcaccaattattttagaaggcagcgtggcacaacctattgcagaggaattacacacaattacgtacgaacaactcatagagctatttaaaactcataactctatcgccacaatctctgctacattcagctcgtcagaaactctacaatgtgcattaagccgcattagttctgaagcgatagctgctgttaacaatggtgcttccctactagtattagatgacgtaaaagcccatctaaatgaaagattgtggattgatccacatttagttactgctaaagtacatcaagcattaagtgaaaataaattacgccgcaattgttctctcgttatacgttctggtgcccttcgctccttacatgacattgtcacgctatatggattaggagcagatagtattaatccatatttattattcgcgactgtaaatgatggaacaaaaacaccaattacgaatctgtataatgcacttaataaaggattagaaaaagtcatttcaacaattggaattcatgagttacgtggttacggacgtctctattcatctattgggttacatgaagaaatcgcaaatatattacagattacaaatttcttcggttcaaatgatttagctttttcacttgaatcacttgctgaagatgcaaaaatgcgagcggatgattataacaatcctaaaattagaatgcgaaaatcatttcatatattcccgcgaatttggaaagcaatcggcgatgttgcaaaaggaaattcttatgatgattaccgtgacaagttaagtgaactagaagagaataatcccatcgcaatcagacaccttgttcaaacgaaacaaacaaaacatgtcgttccaactgaagaagtatctatcggcattaaaaatcatgattttccatttattattagttctatgtcatttggttctcaaaacgaaattgcctttcgcgcatatgcagaagcggccgatcagctaaatatgattagcttgaacggtgaaggcggcgaaattaaagatatgattggaaaatatccacatacacgtggacaacaagtggcatctgggcgatttggagtaaatgccgaactactaaactcatcgaacttaattgaaatcaaaatcggtcaaggcgcaaagcctggggaaggtgggcatttacctggttcaaaagtaacagccaaaatcgctgaagcacgtaatgcgacaattggctcagatttaatttcaccttctaataaccatgatatttattcaattgaagatttagctcaaatgattacggaaattaaaacagctaatcaacttgccaaagtagccgtgaaagtccctgtcgttcctaatatcggaacaattgctgtcggtatcgccaaagctggtgctgattttattaacattagcggattcgatggcggaacaggtgctgcacgtattcacgccttgcaacatgtaggtcttcctgtagaaattggtgttaaagccgctcacaacgctttattagaagcgagcatgagacataaagtagagatttgggcagatggtggtattcgaagtgtaaatgatgccttgaaaatcatgcttctcggagcaaaccgtattggatttggcacactatcaatgattgcaatcggctgcactacttgccgtgggtgtcatctagatacttgccatgtcggaattgcaacacaaatcgagtctgaagcacaagcaaaggaacatgggttacgccgcttcgtcccacgcgaattagaaagcgcagttactggcctgctaaatttattcacctctttcggtatagaactaaaacgattaacaggacagcttgggtatacaaattcacaagcaattgttgggcgttctgatttattagagcaagttcgaggcgaaaatttattaaacttacgtaatttattacaaataatagaacatccatctgttacaacaacagatggtgtaccagaaaaacaatttaagacagttcattccgctgactcaaaagaattagtaggcgttggtgtagagcaacgcgttatgggtggtctagaatcatgttatcgcgttcgcagtaaactatatgaagctactcaacttgaaccacttacattaaagtatacgaatggttctattcccggaaatgggttaggcgcttacaatagtgaaaatttatttatacacgtaaatggcggcgcacaagatggcattggtaaaacttcctttggtggtgggatttatataacgaaatcaaaaggaaaagacggagtatattataacggttctgtcggaaaaggatttggatatggtgcacaaaaaggggcactatacgtgcaagggaacgctgatgctcgcgctggcattcgcctttctggggcagacatgataattggaggtagaataacaaaaccactccgtgaaaaagagcaaggaaatatagggtcatactccaatattaaaggttttgcttttgaatatatgacaaatgggcgagcgcttgttttaggtgaccctggtccatggatttgcgctggcatgactggcggtgttgtttatttgcgtcatgattcaaacttaggcctaacagaacaggccttaaaaagaagaattgcaaaaggcgcaaatgttacattacaaccaattagtaaaaatggtttgaaagatgtaactgaattattgctagactatattcgtgtactaaacgaacatgagcaatatgaggaagttgctttattaacagcattattagatgatatacagaaccagttttttgagattatcccgaaaaaagaacaggcagacccatctatctcaacagagtaaaatgagtaattttcattattaagaaaaaattgacgaagtacgcttctcatagtaatctatagtaacaatttgagacctgctgaaattcagcaggtttttttactaaaaactgatgtttaaaaggaattaggaaaaattataaagtgaaactttaattagcctacaccaatcgagcgtttaccggcatctagcttctaatttttgaggcaggaatcttactactcacaattagcgggataaaatgaacactaatttcttttaacgtcactaaaatatcacttgctaacatattgtaatgaatgtatagtatcatgttgtacattcattatgacaagagaaaggatcttattaagggtatgaaacttggtgctcgcattttaaaaacgggtattgccatcacgttagctttatttgcttgtattttacttcaattaccgagtccggtatttgcgggaatttcagctatctttgctgttcaaccgtctgtataccgttcttatttaacagcacttgaacaaattcaagcaaatgtaattggtgcgatatttgctatcgcatttgctactgcttttggacataatccttttattattggattaacatgtatattagtaattgctcttacattacaattacgattagaaaacacaatatcaattgctttagtaacagttatcgccattatggagtatcaaggcgaagatttctttagttttgccttacttcgatttgcgacgattatgattggtattattgcggcttcacttgtaaatttagtatttatgccgccaaaatatgaaacaaaactttatcatcgtatcgttgataatacagaagaaattgtaaaatggattcgaatgaatagcaggcaggcttctgattttacaacgctaaaaactgatattgatcgtatgaaagaaaaaatgattaaactaaatcattactatttgctgtataaagaagaaagaagctatacgaaaaaagtaaagttcgcaaaaattcgtaagctcgttttattcagacaaatgttagcgacaacaagccgtgctttaagtacgttaaaatcattacaccgtactgaaaatgaactgcgctatatgccggaagaatttcaggaatctatccaaaatgaacttgactcattaacgcattatcatgaacaagttttattaaaatttattggtaaagcaaaaaaacaacaatcagttgaaatgcttgatgaagttgaaacaggtaaacaagaattaattgatatctttatggaatatcaaaataaggacgatgaagaagcatataaaacatggttacatctcttccctcttatttcttccatcattaactatagcgaagaagtagagcatttagatttgcttgtagatagcttctacacatatcataaaccagaaaaagaactccaaatcgatgataaaaaagaagacgaataaaaaaacagctccttttatggtaaaggagctgtttctgttatatgttgaagttgatataaattgtaataaaatcctctttttcgcattaactcttcatgagaaccagtctctttaatctcaccgtcttcaatgtaaataatcgtatcaacatgcgtaatcgtcgctaatcgatgtgcgattataatcgttgtccggtcagcagctaacgtctgaagcgcctcttgaatatacctttcattttctaaatctaatgctgaagttgcttcatctaatataagtaccgacggattctttagaaacactcgtgcaattgccacgcgttgtctttgcccgcctgatagcttcacaccacgttctccaacgacagtattataaccatctggtaagtctataataaaatcatgaatttgcgcagctttggcagctgcaatcacttctttctctgtagctttcggatttccatataaaatattagctccaattgtatcgctaaacaataaattatcctgcagtacaattccaatatgactacgcaaatttctcatattgtactttcttacatctatgccatctacataaaccgcgccttcagaaacatcatagaaacgcgggatcaaactagcaagagatgactttcctcccccactcgctcctacaagcgctactttctctccaggctgcatagttaatgacaagttgtgtaatatctctttttcatctgcattataacgaaaagaaacattgtcaaatacaatttctccatttaattttttcgtttgtaccgcatttggtacattaacaatatcgtatttttcatctaacagttcaaacacacggtccatcgatgcaaaagattgtgttaatgttgtagatgaattaacaaggcggcgaagcggactatataaactatccatatatccaacaaaagctaccatcgttcctagcgttaactgcccttgaattacttcatatgctgcaaaaccaatcacaagtaacggacctaaatcggttaacgtatttactgccgaaaatgttcttgccgtccaacttgtatgggttaatgctttcgttaaaaattcattatttcttttttcaaactgcttcccctcatactcttctaacgcaaagctacgtgtcacttgcattccttgaatacgttcatgcaaatacccttgcatcgtcgctaacgcttgtgaacgctctttcgtcaatttccgaagacgtccgaaaaaatatttcactgcaattacataaataggtaaaatcaataacgcaacaaatgttaattttatattcatagaaaacataacaatgatagcaatagcaattgttgcagtatctaaccagacgttcatcaaaccagtaattacaaaatccttcgtttgttctacatcatggatgacacgcgaaataatctcccctgtttttgtattggagtaataacgtaaacttaacttttgtaagtgaccgaaaatatgcttccgcaaatcatacagtattgtatttgcgatatgttgggcgaaatattgacgataatattcaatcggtggtcttaataccgcaaaaataaaaaaagcaattccaatcgctgttattaattgagatgttttatcttgaagtgagcccgcgccttgaattacatcatcgataatatactttaataaccacggcataataagtgggataccgaacttaactagtccaataataattgtaatagcaataagccatcgatatggtttaacaaattgtaaatatctttttatgccttgcacataatcccccctctaataggacaaacctgccgggaagccccctgcaggtttgttttaatttctgtacattaaatatcgttcataccacatatctacgaagtctggtgcaaatggaccttttctttgatgaatccactgtgttaaatgtgctacatttcgttttaaaattgtatcaataacaggtggatactgcataatttgactatgtttttcatactcatcttcatctagaagcgtatatgtcatatctggatatactttaatatctaaatcataatcaatatactttaatgcttcaggatcatacgcaaaaggtgagcttaaattacaataataatatacgccatcttccctaagcatcccaatcacattaaaccaatagttggcatgaaaataacaaattgctggttcacgagtaatccatgttcggccatccgattctgtaactactgtacgatcattcgctccgattacaagactctgtgtcccttttaaaattgttgtttcttcccacattctatgaatggagccattatgtttataactatgtatttgtactttttctccttctttgggaaatcccatatatgctcccttctttcaactgcaaatgccctttgaacggcattcactttttttctattataacttttttgtcgaaattttaaaactaaagggataagactctatttttcaaactgaatatgcaggaggtttatcgttgaatactatgccccaactcttcttaagagatagggattgtactgcattatttataagcgaggacatgtaatagaaaaagcccttctctatttccatacaaagaaggacttttcacctgaagataacaatatatcttatcctaaatttgaaatcattttttcagttgtaaaagattgaattacactattcgtttgttcttcaaatttctcatgtaacatcttcaacgctacttctgttctatatatttcctgacggataaaatgcagttcttttttatcgcacgtatctttttcattcatttcgatttgttgatacttctctagatgtgcttgtaactttaacaactcatccatcgtttctaattgctcccctaccaacttatcaaaatcgttcattacttacccccttttggacttattcatcagttattattcctaattacataattctaatttttaacttccttctcctttgactacatttgttgacttattagaagttatgtcgttcgcttccttttcattacaacgatccacgcaaaaagaaaacacttctcccgaattagagaagtgtttttctttcattactgatttgagctagaagattgtgattgttttgcagctgacttagcattttgttttttcacagaatgcacgtctgtttcagttgcaaattctgtaccataactagcgtttgcactttgtgcaccagaagcttgtgctttctttgcttctgattgtgcgtttgcttgttttacagcttgtacatctgtttcagttgaaaactctgtaccataactagcatttgtactttgaatgctagcaccagaagttgctttgttataaccttgttgttttttactcatctttctcacctccacaatcaataatgtaaccaattcacttagaagctatccgtaattttcttttttaaaatttccgcatataacttttgttactcattcaaactatagaaaatggaggtgtaaatatgtatataggacgcgatatgactgaactaacgatgatttcaaaaaatgaatggaaagaagatgaattagcttattttcatcactcactacaacaggttctgccttatttaaatgtagaagggcaaagtatttacaaagaaattgtagtagaaatcgaatcaagaggcggcttacaagaaggtgaagctagttggactcatgggacaaaaatttcttacgattaaaaaagtgttccctagattgggaacactttttttgtttattgcattgtaattttctccacacaattttcataaatagtacggtgtgattttgagaaaggtaattgctcaaatacctcttttgatacaaattttaatgtatctgtatcaacaatattaccggttatttttccgtaaaatacaaatatatcccaagtacgatgtgtaaacgtatgttgtacattcattgcgtattcatcaatagaaacctcgagctcaaatttttctttcatataatctataagctgttccttctgatttcgaataccttctccaagttccacattcggaaactcccacatgttagctaacaaacctgtacttggacgtttattaataacataacgaccgtcttcagtttgaagtacacctgcaacaataggtaccattttaggagctttcgctttactttttactggtaattctttttgaacaccttcagcatatcctctgcaatgttcacgtacaggacaaagtaagcatgctggatttttcggaatacaaattagtgcacctaattccatcaatccctgattaaaataagatgggttttctactgaaataatttcacgcacaatctcttcaaaaacttttcgagtctttggttttgcaatatcatcccatactgataaaatacgagataatacacgcataacatttccatcaactgccggctctggtataccatatgcgatacttaaaatagcaccttttgtatatggtcccactccttttaacttttcaattttctttacatcacttggtacaactccgccgtatacttcttttacctcttttactgccgcatgtaaattacgtgctctagaataatatcctaaaccttcccatgcttttaatacttcttcatcatctgcgttcgctaacgcttcaagtgtaggaaacttccccataaaatttgcgtaatatggttttacagcttctactcttgtttgctgtaacataatttcagaaacccaaacgcggtatggatctttattctttctccatggtaagtcgcgctgttcttcttcaaaccaaccaattaaatcattttgaaactgctctatattaaaattgtttagtatttcaagtgtcaaacttgatccccctcatttttttgcatataagtactattataaagattttaggaaaaaatttaagtaagatgatacaggaaatagaaggcaaaggacttgaggtatcgaataaaaagagttacattaataaaaaacggaggtggatttctatggacacagccactcaccttgttatgggtatcactttaggtagcttagcaacattagatccagccatagcacaaagtgatattggcccccaagctgttatgcttgctacaattgctggttccaacattcctgacattgacacagttttaaaattgcgtaataacgctaaatatataagaaatcatcgtggaattactcattctattcctgcggtaattctttggtcattccttataagtggcatctctttcgccttcttttcagacgctccatatcttcatctactgctttggtcatttattgctgtcttccttcacgtctttgtagatattttcaatgcctatggtacacaagcattacggcctttcacaaaaaaatgggtcgcactcggcgtgattaatacattcgataccgtaattttctttatccatatacttgcaattgcttgcatgctcgtcggttctcataagggatatacagctttagcggcatatatattaatgattgtttactatatcggacggattatgatgcacagaaatataagaagcgttgtacacaaacgtttcaaaaatgtcgaaaagattatcatttctccttcttaccgattttaccattaccatttagcaatcgttacggctgattattactacgttgcgagatggcaccgtggtaacatcatgatatatgataagttcgatcgggtaccgttcccagacaataatattatgcgagcagctaaacaagatgaaaacatctcggcctttctatctttctctcctgtatatcgctgggatatttttgatcatgaccattattatgaagtacgattcattgatttacgatatcgaagtaaagattattatccatttgttgcaatcgttcagctcgaccacaatttaaatattattagttcctatacaggatggatctttagtgaagaaaagcttcgaaaaaaactggaattacttccacattaaaaaaagcgacttaagtcgctttttttaatgtttcaaatgatcttcttgattaattaaatgactatacttcggattatttgtacgcatttcatgaaggcgtacaccatgattattaatccatgatcgtaccacttgttctgtcatttcatcgccttgataacgacctgattttgcataagttgtttgaaaatcttcccatagtaactcaacccacgcacgagcttgtgcgtaagaaagcttgtcattcttgtctaataattctttcgttaatgtttcataaatatcattcatattataatctccttttacctatttatcccttcatttctaaaggatagtttcttcaattttgcacattctataattgatacttcttaaagaggtatcaaccgataatgaggagggcgttcgtaatgggtaaacaagccgaattttggtctgagtcaaaaaacaacagcaaaatcgacggtcaaccgaaagcgaaatcacgcttcgcttcgaaacgacctaacggcacaattaacacgcacccacaagaacgtatgcgtgctgcaaatcagcaggaagagtaatacaaattaaattaacttcctacacgaggtgataaagatgagctaccgtgatcgcttagatagtcgttctgaattatttaaccatacgtggactcgtccaaaacatgcgaaagcgcaagttaacggacagacgcaacaaacccagtctctcattatattggcaaatgaatgtaaaaaacgccaattttagaatctcctatctcctttaacgcctaccaaagatgaaaaccagagagatatatgctctctggtttttatttttcttgcaataaggaaattggtatgccaatctcttcattatcattttgcttatatccccaagcaaataccccattgaaatacgtaattttaaataatacaccaggttcttctactaattcatatgtttcaccaatacggaatttgtttatatccgtcatataagcacgagccattgccatttttctcattaatacatcaaattcattgacaatcccaagctgctcagcttttactgcttgctccttcaaagcgccaatttcttcccttagctcatgcggtgtcatttcactgtagcgttttggcatattcatcttattctcctcattcctcttcgcgtttcatttgcaaaaatatctcgatttcatcaatagagaatccttttcgatataacgcttgtttcatcttgttttcaaatgtccatccatcatgcttcttatatttctcataatatttattcccatgatagtgtaacgcttcttgttgcttttcgtcatctttttcgtctttcaattcttccaaacaaatttgaattacttctctagaatatccttttcgaacaagcatctcatctaactttagtttcatttgtaaaaaagaatgtttttgataagattttttcttcttctctatgagaaacaaggcattctcaatttgcttttccttcggatattcttgtaaactatgtgtaataattaaatcctgaacacctttatttaataactctcttttaataacagttggaccttttcgattcacattactttgcgttcgcgtatataaaacagcatactctttatcattaatatatcggtcatgtaataatttcgaaacgacttcagagatgatggcctgtcccacttctttttttcgtaaaaaatcttctatttcttgttttgttctcatttgataggataaataggagattgcttgtaaatatgctttttgcacttcttcattgtacaaaatatttcctaactcgatttcatcaatttctaagcctttttgtaatccatgttttattaagattacttgatccacactaaatccgtactcttcgccttgacctttatcaatataaatattaaatcgttctttcgatcgtttttgtacttctatttttgtaatgacagccatactctcacctctctattattttaacatagtcgaggaacattttttcttttcaagaatatatataatgaggaggaaatacttgtgaaaatcgcaatttctggtggtacaggctttatcggtaaatccctttctactttttttattcaaaaaggatatactgtttacattctcacacgaaaaaaaactactgaaacttccgatcctaaccttcagtatgttcaatggacaccagatttacaaaccttccccctctcttctattgatgtagttattaatctagccggagagtctattaatagtagatggacaaagcaacaaaagaaagccattttaaacagtagaattcaaacaacaaaaggactcattaaacaattgcagggactccatacaaagccacacacatttattaacgcaagtgctattggatactatggaacgtctgaaatagagtcttttacagaacagcatgagactcctggaaatgactttttagcaaatacagtatattcatgggaacaagaagcatctaaagcacgttctctcggaatacgaacaatctacgcaagatttggagttgtattaggtgcaaatgaaggagctcttccaaaaatgctacttccctatcaattctatatcggcggcaccattggttctgggaagcaatggttatcatggattcatatagacgatgtcgttcgtatgatggatttcattatacacaaaaaagaaattgatggtcctcttaatatgacagcaccaacacctataagaatgaaggaatttggagaaaccattgcaactataatgaaaaagcctcattggttgcctgtaccttcttttatcattcaaactttattaggtgaaatgagcatacttgtactagaagggcaacgtgtattacccattaaagcaattgaacatggataccaatacacatttccagaaatagaccatgcattacaaaatatactttcgcatacaatgtagtacttctaaaacacaattttacatgggctctttcaaaactttcattttctaggatccgaagcattaccatacaaataacctttcagttactttcccttaacttccattagcattataaagtaacagaaatgaggtacctatgaaaatattgctcaaacaagccattgtataccctattacatctcaaaagtttcaaggagatgtactcgttacaggagagcgaattaccgaggtcaaaccttttattccacctactcaagatatgaccgttatagatgcacgagcactccatctcttacctggctttattgatgtccatactcaccttggtctctatgatgaaggtactggttgggctggaaatgatgccaatgaaacatctgaagtttcaacaccacatattcgttctttagatggaatccatcctttcgatattgcctttcaagacgctgtacaaaacggaattacaaccgttcacgttatgcctggcagtcaaaatattatcgggggtactacttgtgtaataaaaacagctggaacttgtattgatcatatgattattcaagaacctgctggtttaaagattgcctttggagaaaatcctaaaaaagtccatagtaatggaacaaaagaatccattacacgtatggggattatggggttacttcgggaatcattctatgaagcacaacactacgggcacgaagctgattttcgaatgcttcctattttaaaagcattacgtcgtgaaatacccgtacgtatccacgctcaccgagcagatgatattagttctgctctacgctttgcaacagaattcaatctcgatttacgcattgaacattgcacagaaggacactttattgttgaagaactttcaaaacacaatttgaaggtttcagtcggtcccactctgacacgccgttctaaaatcgaactaaaaaataaaacatgggatacttaccatatattatcaaaaaatggtgtggaagtttctatcacaacagatcatccttatacacccattcaatatttaaatgtttgcgctgctgttgcagtaagagaagggttagacgagaaaacagcactagaaggaatcaccatattcccagcacgaaatttgcgtttagaggatagaattggaagcatcgaagttggaaaagacgccgatctcgtgctatggactcatcatcctttccattatttagccaagcctgtactaactatgattgatggaaaaataatttacaaaaaaaataaaaaaaactagtttatttttttgactagataaagtattatacgattataaactgaatgaaaccataatcaatttgtgtcgtgattatcattttcaaattgatgaatggggaaggcaaatggtgcgccaccagcgttagaaactggttctagtgggttcgattcccaccccgaaattttttaaagattgatataaaaatttcgagggtggggtgttttttcgtcatgctaccctcgtgtgaggaggagttagtatgttgaaaaaacgcgacttacacgacagccacgttctatacgagttaatggtggatccagctgtcttcccttttgtgcgtcaaaaggcttattcttatgaagaatatttattcttaacgaaacaaacgattgaagctgaagagcgtggtgaattaatttcacgcacaattttagatgaatggggtaaccctatcggaacaattactttatttgatgtgcaagaaaaagctggatttctcgggacatggcttggcaaaccatatcatggaaaaggctataacaaattggcaaaagattcattttttagtgaacttttctatgaattagatattgaaacaattttcatgcgtattcgtaaaataaatattcgttctattaaagctgcagaaaaactgcaatatgtgaatctagcaaacgaaacaagaaaagccgtatatgatgaaattaacgcaaacgaagaagtgtataacttatatgaaattccaaaagatcaatacacacttgctacaatgcgagatacaaccttccaagatgctcatcaattaaaagaagcgtaatctaaattttctgaaatgataatcaatcgttaacattttccatatgcgtatatcccctcatgtctttggaaacgataaatagtaactttaagacacgaggtgatttgtaatggataaaaagaaacgtgataaagcaaaaaacacattatctagtacacaagaagttctctatcaacgcgaatttcaaaaagcagatcgtgcagcaggatatcgctcgaaaagcatttaaagtgaaaatgaataattagaagtttcccccctaattattcattttcattacataattttctcgactgatagaagtaagcaaaaaagccccttatacataagggacttttttgctgtggacaactttatccacaaaaccgatgaaattgttagtaattttcaaaaacatttaatatttttctatattaaagcatatatcagctgttttaattgtggatatttttctaaaaattgtggacaatgtggatatagttgttaatattccgactttactgtttaatgaaagcgcaatccttttgtggataactcactaaatttcctttaaaaataataaagaaccctctttacatatacaaagagggtttcatattaagtaaaagattgtgcaagagcaggtgatttaataggtatatgacgcggttctgcatgattttccgccaaaattgcatctacaatatggccagctggctctggaagatagatgcttttcattgcttctttcatttgaagaagcttcacatcatcttgtaataatgcctctgtttttgcaaaaacctcactatcatcgcgaatgacaactgctgctccctttctttcaaagtacatcgcattttcattttcttgtcctggaacaggcttatataaaatgacaggtacttgcaacgctgctgcttcacttaatgttattccgcctggcttcgtaatcatacaagaagtaacacggaataattcatcaatattttcaacatacccaaacacttttaatgcatcggaattttgcttctgtaaacttaataaatcctgttttaaagcttcatttttcccacaaacgacaactacttgtaaattaggcactgacataaatgattggcatagttcttttacatttcctaataccccatgagcacctgctacaattagtaaaatctttttattcttacataactgatatttattatatatgatttctggatttacctttaactcaaaactactccgaattggaattcctgtttcaacaatttgttccgcaggtacaccgatatcaaccatcaattctttcacatgatccgttgcaacaaaataacgatctacttctcgatgaatccatattttgtgcacgcaaaaatccgttaatacgttatagacaggaattgaaatacctgtttgtttctttaattctggtacagcgataattggaaatgtattaattacaatatctggtttctccacctgtaaaagtgttttcaaacgtttccttccaaagttcgcataccaagatgctattttcttatcataaattttttctaccccgtaataaaacaaacgatataattcttttcctattgtataactttttaaatatagatattttgtaatgtcagttataaatggatgtgattctccaaacaagtcgcatacaataacatcttcaattcctttttggcgaaatgtttgttctaatgtttttgctacttgcacatgaccattaccgtaatgtgcagttaatattaaaaccttggggttttttatcaaacaaatccactcctagctttttgtttctccatattgcatatacgacaataggaaaaacattttccttaaaaattacataaacagattctaataattccctttcagctatgtacctgtcgtggatatgcaaagcatataagattgaccccttaatcctatctgtgctcatatctttacattatactttcctataagagctttcgcaataacttacaaatgttctctattccatgatactcactcttttacttcttaattctttttactattttgatttccctttacaattatgtaaatttctccatttattccgtacaaaattatggatattctattttcagtatactcttttatcaatatatactctagattttattgtaaagaaagcaaaaagcctaatccaatatttggattagaccgcttgtaaaatatatttagcatgttctacatttttctcagtaggtggttctacatttgcgagtggatacttgtgtccaagcgcctcccatttatatacaccaagcttatgatatggtaacacttcaactttttgaacattagacagactttgaataaagctagatagtttttgtagatcctcttcattatccgtaacaccaggaactaatacgtgtcgtacccaaatcggtttattcttatccgataaataacgagcaaattgtaaaatatgttcatttggtttccctgttaatttacgatgctttttggaatcgatatgtttcagatccaataaaactaaatctgtataatccattaaaatatctagcttattttggaattctggttcctcagaataacaaccaccagaagagtcgattgttgtatggataccagcctctttacactttttaaacaactcaattaaaaagtctagctgtaataatggctctccaccgctaactgttataccgcctccggaagcttcaataaatggaaggtaacatgtcacatcctgcatcacttcttcaactgttatttctttacctttaccgatttcccacgtatcagcattatgacaatattgacaacgtaataaacacccttgtgtaaatatgacataacgaatccctgggccatcaacagtaccacaagactctacagaatgtattcttccttttaccatgttacttcctcctttattgaaacagcctcccttcgctatatattaagagcgaagggacacttttttcatttacatgctttcatgcattgtacggttaattacatcaatttgttgttcacgagttaatttaataaagtttacagcgtaaccagatacgcgaattgttaattgtggatatttctcaggatgttccattgcatccattaatgtttcacggttaaatacgttaatatttaagtggtggccttcttttactgcatagccatcaagcattgatactaagttacgtacttgtacatcatcttctttaccaagtgctttcggaataatagagaatgtattagaaataccatcttgtgcatcttcatatggtaatttagccacagataataatgaagctaatgcaccttttgtatcacgtccatgcattgggttcgcacctggtgcaaatggttctccagtacggcggccatctggagtattaccagttttcttaccgtatacaacgttagatgtgattgttaagattgacattgtatgaacagaatttctgtatgttttatgtttacgaagtttattcataaatgtttttacaagatttacagcaatctcatctacacgatcatcattgttaccgtatttagggaaatctccttcaatctcgaagtcaactgcaataccattttcatcacgaattggttttacttttgcgtatttaattgcacttaatgaatctgctactacagatagaccagcaatacctgttgccattgtacgaagaacgtttgtatcatgaagtgccatttcaatacgttcatagctatatttatcatgcatgtaatggataacatttaatgtgtttaaatatagacccgccaaccattccattgtcatatcaaacttatgcataacttcttcataatttaatacttcagaagtaattggtgcgtactcaggaccaacttgtgctttagatttttcatctttaccaccgttaatcgcatataataatgctttcgctaagtttgcacgagctccgaagaactgcatttgtttaccgattctcattgcagatacgcaacatgcaataccgtaatcatcgccgtattcagggcgcataatgtcatcattttcatattgaattgctgatgttttaatagacattttcgcacagtagtttttaaagttctctggtaattgtttagaccaaagaacagttaagtttggttctggagctggtcctaaattatctaatgtatgcaagaaacggaatgagttctttgttactaatggacgaccatctaatgccataccaccgatagattcagttacccaagttgggtcaccagagaataattcattataatcaggtgttcttgcgaatttcacaagacgtaatttcataatgaagtgatctacaatttcttgtacttcttcttctgttaaagtaccatttgctaaatctctttcaatgtaaatatctaagaatgtagaagtacgcccaagactcattgcagccccgttttgctctttaatcgctgcaaggtatgcgaagtataaccattggaatgcttcttgcgtgtttgttgctggcttagaaatatcgaagccatgagaagcggccatttcttttaactcttgaagtgcacgcatttgctcagataactcttcgcgtaaacgcattgtatcttcgctcattacaccgccagttaaatttaaatcagcttttttcgcttcaattaaatgatcaataccatataacgctactcggcgatagtcaccgataatacgtccacgtccgtatgcatctggaagacccgtaataacacctgatttacgtgcatttctcatttctggtgtgtatgcatcaaatacaccttggttatgagtttttctccaatctctaaaaatacgactaagttctttatccatttcgtatccataagattcacaagcttgttctgccatacgaataccaccatatggttgtaaagaacgtttaaatggtttatcagtttggaaaccgactactttttcaatatctttatttaagtatccaggggcatgtgatgtaatagaagaaacaatttttgtatccatatcaagaacgccaccgttttcacgttctttcgttgttaaatccattacttgatcccaaagttgtttcgttgcttcagttgcttctgctaagaaagattcgtctccttcgaaaacgtttacattatttaaaatgaaatcgcgaacatcaatctctgctttccatttttcacctttaaagttttcccatgcgtttttaacattttctaatacttgagtcatcctaatctcctccatttttgattagtacaggactaagattttttatataacagcttacacacttagaatactacttttttacgaaagtgaacgaaatagttgtgacatgtttgtgaaatattgagcaaactactatatatatagtgttaacttcatttaaaagtctttaaaattaaccctttccttaattgtatttttttggtatccttatatacgagtcctattttgtaatataagaacaatacccattgtagagctgtaatactcttatctcctaatctgttatagtttttataacagaacaaaaaagtgtacacatgttgtacacttttttgttacttctataaaacatctctttttctattgccatcatagaatccgccacgattgtctgttaatgaaattatttgctctagtccctctatatgatcacctataattcgaagtacagctggagggtgacctatttttgcgaaatgttcactgggacgaatacggttcatcttatcaacctcaacacgatatacacatgcaatttcaaatccagacagaagagccttcacttgtgctacacaaggtgacaataaagatttatacccaattgctttcaaacacttttggctaaatgcattaggtaccgcaataagtgagcctacccctaaatcctttctatcacaagctaaatttagtgcatacttaaatgcagttacaagatgaagtggtactcttaaatctaaatagtgatttaaatcatttaatgcgacgtcctttccatctgctatagcttttgcaaaaggatatagctcactcgctggaataataaaatcgccgtctataaataacacaatttctcctttggcaaaataagttccaagtgagcgccctacatcatttccgagtgcttctttatatacaattgtcgttgcccctttgtcttttgcaatttttttcgttttatctgacgaaccatttacgacaacgataatttcgaagggttcaattttgcgaagctcttctataacgtttccaattgttttctcttcatcttgtacgggaataacaacagatagttgctttcctttatacaaattagatgtgacgccccatccttgataaaactcttcaaaacttaaagtatgatagacactatcccttttcctatttccatcataatatcctccgcgctcatcactgcttaatatccgtgccgctactgcttctatatgatcacctatcattcttttttcagattgggaaagatttgttccatatgcagcatgctggaatggacgaaatttatttggcgtaataacgtcaatggcgcaatgacgactaattctccatttactttgaagtaggcgtaaatgagccacaataggattaacaaaacattcatatccgatgctttgaacgacttctttcgtcagcgcatgaggtacatctaataaagaattaatttttaattcttcacgctctaacattgcatttaatatttggcgccatactgtaatagaagtaggtttttgcctttttaaaaataatgcatccaaattatttaaaactacatctgcctgatcgtataaaatcggattaaggaataattttaattttgaagtttgaatagcaaaatcaccatctataaatagtaatacatcacctatcgcatgttttgcgccgactgcacgtccaacatcgttccctagtagctctgtatgtttgattactttacaccctaaacgatctgcaacatcttctgttccatcattacaaccgtttgctactacaataatttctactggatttaatggtcttaccgattgaataacgtctgaaatcgtatcgacctcattacatgcaggaataataacagataatgacttagccattgttttgttcacgaaaccacttaattgtttccttcaatccgttttcccacgttactttcgcctgaaattgaacaagcttttttaattttgttacatctggtcttctatttggaatttcttcaaaaccatgaggatatacttcttcaaaaggcacttgtacaatcttcgaagaagaattcgttaattttttaattacttctgctacttcttttatactctgttcattctcagaacctatattaataatctcaccatttaccttctcatccattgcccgaattgttgcttctaccgcatcactcacatacgtaaaacaacgtgtctgctttccatctccatatacgagaatgtcttctccttgcaaagccgcactaataaatcgcgggattacccctgcatacggaccatctttcgctcttggaccataaatattaaaatatcgaacaatcgttaccggtaaaccttctaatgcgtatcctaaacataatgtctcttccaacgttttacaaactgcataactccaacgaattttagaagttgccccgtataatcgatctccctcttcagagaaaggcggcttggccttaccatatacttctgaagtagaagcaaaaactactttcttctttccttttaacgctgcttgtaaaatatttctcgtcccatcaaaattcgtttctatgagctctatacttttttccattgttgttttcacacctaaaattgctgctaaatgaaacacgacatcatgctgatctactaattcataaatagaatttttatctaaaacacttattggaataacacggatttttttcattaactctttatggtacttatttttacctttataaaagttatccacaacagtgacctcataacctcttctcatcaactcttcagctaaatgcgacccgataaatccggccccacctgtaattaaacatttcttactcatttactcaccttctttacaatcccgcgtgtatctattactcggtccattcctttaaaaagcttccaatcaatattagaatgatccgttaaaattaaaatacaatccgcttttttaactttttcttcatctaaagaaacagattgatacaccttatctccaatttccgcgaaagaaatataaggatcatgatattctatctcgtatccttgatttcttaataattgaataatcggtaacgctggtgattctctcaaatcatttacatcttttttatacgcaatccctacaattaacaccgttgcaggtgattgcaccacactttttactttccggaccattttctctggcatttcttcattaattatatgtgctgcctcaattaattgactaattgccccattcttttttattctccattgaaaatataaagggtctactggaatacagtgtccccctatccctggccctggccaatatggagtaaacccaaatggttttgtagatgccgcttcaatggcctcataaaaatcaatgcctaaactttcacatagtgtgtttagttcatttactaaagaaatgttaactaagcgctgaatattttcaaatagcttgcacatctctgctactttcggagagctaacaggtacaacttcgtcaaaaatggtactatataaatcctgtaccttttgtctacacttttctgtttgtccactaataacttttggaatagcttgaactgaatattgactatttgctggatcaattctctcaggggaatatccgatatagaaatcttcccctaccttgttactattttgagaaataataggtatgatgacttcttcaagtgtgcctggatatgtggagctttcaaaaatgaaggtttgtcctttttgaaggttttgttgtatataatgcgaagctgaaatgagggcacttaaatctggttctctttgttcattaattggagtcgggacagtgacaataacataatcactactttgaaaatcagcaatgccttgatccggtgtgtttactgttaatttttttttcgtcaataaactttgtaactctttagaagaaacatctggaatataactttctccttttataattgagtctatttttctaatatctttatctaatccaagtactgtatgccctctttctgcaaaatgtaccgctaaaggaaggccaacataccctaacccaataatagctactttactactattcatttgtattctcttcttcccttctcaattgttgaatgatatctctatctctatctccatcagtaaagccaccacgttcatccgtacgttgtaataaatacgtaaccgcctcaagttgatcaccgaaaatacgatcaaacgctgaaatacgcccatttacaaattcgtgttgctctggacgtactcgatttgtttttataacatctactaactctactgttgtaatagagaatccttctaaaatagctttcacttgtgctaatggcggaatgataagggcgtcatatcctattttctctattaccttcttatgcatggcatgtggtacagcagttagtgagttattccataaatctggtcttttcgctaccaaattcaaaaagtattttcccatactaattggatctgctggatgaaacatatctaataagcattgtaaatcatttaacaccacgtcatttccatcttcaacagcatgtaaaaatggagtgagtttttttgctggaataacaaaatcaccatcaacgaataaacaaatatctgccgtagcatgcatagcccctattgctcgtgctacattatgtccaagcgccttcgtaaattcaactacaataacattctctagctttgcctgtttaacagtctcaacatctgctccattcgcgacaactataatttcatctacacctgcttctttcacttcttgtataacagaccttatagttattttttcttctgataccgggataatggcactatatttcgcttttttcttttgtaataaaactggtttatactttcctacaaacgctctatctctattgtcctctgaaaaaccaccgcgattaccgtatgtttcgattacgtattgtaaagcacgcaaatgatcacccataatacgactagtcgctttcggataaggagagccaggtgatgcgcccgtatggacaggacgaactttatttgtgtaaatgacatcaactgaagccatatcagaaatatctactcctctagacatcgccatcgcttgaaataatgctggatctgctaaattccaccaccccagtttttcaatcactttacgacttatcgcatgtggtattgcaattaaagatcctacaacaaactccttcttgttcaaataacgatttaacatatattttccaaccgtcgtataatgcggtctcatcttcaaataaacggaccatgttaaattatttaaaacaatctcatgtccttgctgtattcctttaataaaattgtataattcttcacttttcatgacgatatcaccatctaaaaataaaacaatttcaccttttgcttctctagcaccaattgcccgtcccacatcattaccaagggaatatctataataaattacacggcaattatgctgtagcgctatttctttcgtaccatctgtcgatccattatctactatgataatttcatatggttcgagctttcttacttctactaaaacttttgataaagtacttgcttcattatgcactggaataacaactgacactctcatacttgtatcactcttacccttccaagcgaacatatgaaataataggaatacgtacaactacatcttccggtggtccataagaaggagaagtacgaacacttactgctccatctgtcacagataacagaatacctgcaacaatttcggccgctgtcacaacttgcactaactcaccaacatggttacgtaattcttcagtaaataacatatataagtctcctttcttacgcttctttaattgatataatacttgtaaatggtaataaaacttctgttcctattccttcttgcaatgttaagaagtcatcaccaactgctacaataacgcctgttaactgtcccactgtcacagtaatttctacgtttttacctaaatactgctctgcaatttctttaaaaggtgatgtattacattcttttaaaatgttacaaataatcgattgaaattgacttgatttaataaattcttctgtagcttgcttggaatttctttgaataaacctcgcgaagttttgcgaaaataaaagtctttccacagcaggcaataacttattatctaaaaaataatctaattgtctattaaacaatcttgataactttttccaataattactgaacagacacatatacttctcctcctattatttttaaattataaaaatacatccatacatcttaatgtatacaaaatagatatttttgtgataggtaagacatacattttctaaaagaaatatttgtttcagggcataaaaaaaactatccaaaaggatagtttcttacacttcaatatttcttaacatcgtatatatatcgttattcactttaccaaatgatttaatattgttttgaatgttagataataaaacaacgtacacactaccgtttttactaaatccatttaaacaattccaacctggcattacaccatgattcgaatagcttcctgggtctacgtaccagccaaatccgtaatcctttttcacggctgtaaacatttgatcgtaacttgcttttgaaattaactttccagagtataacgcttcgttaaataaatataaatcatgtgcactcgtatatatatcaccacaaccatatagttgtgacatgctcggaatattaggtgttgtcatattattatttactattttataacccgttgatgggaatcttgtttgttctaacgctgtgccaaaaccagaatgtttcatacccgcagtagcaaaaatatgttgtttaatatattcttcgagcgactgtccacttaccttctcggcaatgtatgcaagtacggagtagttcgaatcggaatacttccatttctctcctggaccaccaatacgcttttgatttcctatccgctttatcagttcttcatgagaaatatcttcttttccctgctcatattcgggaatccctgatgtatgtgttaatagatgttttagctgaatactattaccttgtgggaaatttggaatatactttgcaacagtatcttctacttgtaatttattctgatctttcaactgcataatagcagttgctacaaacgcctttgaaatagaaccaatataaaaagtcgtctctgaattattcggtacttgctgctctttatttgccataccgtatcctttattcaaaagaacttttccattcttcacaataacagctgtcccgctaaagcctgcgttttttaaatactggtccaattgagcgttttcattaatttcttgagttggtccttcagcaggctgttccgcaacttgcgcttgcttcacttgttcttcctgctctttttgtttttgcttctgtacttcttgtttctttttttcttctttcttttttagctcttcttgtttcttcatttctgctgccgcttttaaagtttcttctttcttattatgcgcaacaatttttgtatacatgaaatatacaagtgataatagtaagacgagaatgattgttcttttgatgtatacaatcggccgacgtactttcccattcgcattatttttttcctgatccataattgcttttttccccttactcaccaataatttaattcctctattaaagatttattttagtagattatggataatccattctatatcatccctactttatcacgcactgcacatattaccaacctatatgtacaaaaaagaaaaagaaaatttacaaaagtaagattcccgttaaattattaacaaaaaaaagaggatatcctctaaaaaattgatgttatcaatctttttggacatcctcttatctcattatttatacgtgttttttcatatcatcggcaacagattcaacatttgtacctacgataacttgtacacttgtattacttaatttcataacaccttttgcaccagcacgttttaatgctgcttcatttacttgaccagcatcttttacttgtaagcgtagacgtgttgcacagttatcaataactgttaagttttcttttccgcctaaagctgctacgtaagtttcaccaattgaacctgcaactggtgcatcaccatcttcaactaactcatcgtcatcttcacgaccaggagtttttaaatcgaacttcttaattaagaagtagaatactatgaaataaattgctgcgtaaattaaaccaatacctgctagtaagactggttttgttgcaataccgaagtttaaagcgtaatcgattgcaccggcactaaatgagaaaccatcatgaatgccaagcgatgttgtaatgaataaagaaagacctgttaatacagcatgaataccatataatactggtgataagaacatgaatgagaattcaataggctctgtaataccagttaagaatgaagttaatgctagaccagctaacataccagtaactgctttacgcttttctggtttagcagctgcaatcattgcgaaacatgctgctggtaaaccgaacatcataactgggaagaaaccagtcataaacatacctgctgttttgtcacctgcaaggaaacgagcaatatcaccattaacaacattacctgctgcatttgtaaagtccccaaatacaaaccagaagtatgtgttcattacgtggtgtaaaccaattgggattaataaacggtttaataaaccaaatagtcctgaaccaattgcacctaaattaacaattccatgagctaatgcatcaataccattttgaattgttggccaaatttgtgcaaatagaattcctaatatcagcatcacaactgatgtaacaattggaacgaaacgttttccagcaaagaaacctaaccattctggaagtttaatcttatggaatttattataaagaagtcctgctataacaccaacaataataccacctaagactttcatatctactttagtcgataattcagcagccttagatacttgtgtcattgtatccgcaagcttagatggatctacatttgcgctattacctattaaatcttggactttacctaatttaccttgtaattcagcagttgaataccctttgctaagtgcatcaatactatttttcataacaagataaccaattgcacctgcaagacctgctgcaccactaccatccactgaaagaccgattgcaataccaattgcaaaaataagtgctaagttatcaaaaactgctgcgccggcctgtgccataacaggaatatcaaatacatctggttgccctaaacgaagcaataatcctgctgctggtagtactgcaatcggaagcattaaagctttaccaatacgttgtaaaaactgcaacattttaattccccctaatcaaatttatgaaatcgttatcattataagtacgctttagaaaacgctttctattacataaccataataacatatagttgtatagatgtgtagtttttatttctgaactttttatggataaatctcctatttccaaactgttatataaaaggaaaattctcctttttaaaatacagaatactcgaaacgaaagacctattatagcacattgaactttcgttttatcattccactttttcatgttattatttatttccgagcatatcgggaaaagtaaacttagttaattcaaaataggagcgttggtactatgcagtgcattgaaacaaacaacttacaacagttgttagaacaagtaaaaccatatacgaaaaaaggaaaacttgctacttatatccccgaactaggaaatgcaaatccagacgatttagggattgccattttccataaagaaacagaatatatccatgcaggtaactcacaaacactatttactcttcaaagtatttccaaagtaattacacttgcccttgcccttttagaccgtggtgaagaatatgtattttctaaagttggaatggaaccaacgggtgacccatttaattctattattaagttagaaacgacaagtccgtccaaaccccttaatccaatgataaatgcaggagctttagctattacaagcatgttagcaggaaaagataacgaggaaaaaatggaacgtattcttcattttgtacgtgaaataacagataatcctactattaattattcctctaaagttgccgattcagaactagagacagcttacctaaaccgttcactttgttattatatgaaacaaaacggaattatcgattgtgatattgaagaacttatggatttatatactcgtcaatgcgcagttgaagtaaactgcatcgatttagcacgtatcggcttaatttttgcaatggatggatatgatccatataagaaaaaacaaatcatccctaaacatattacaaaaatttgcaaaacatttatggtcacatgtggtatgtataacgaatctggtgaatttgcaattcgtgttggtattcctgcaaaaagtggtgtagccggtggtatttttggctgcgtaaaaggagacatgggaatcggtattttcggaccagctttagatgcaaacggaaatagtattgccggttttaaaattcttgaacttctttctgctcaagaaggttggagcattttttaatcgcgagttatcctgctatactagcaggattttttatttcgccaaaacctcacttttgtcagttatcaatcctcttacaaaaacagtgctgaaagtttctctatatcatgcatatttgttcccccctcctgaataatatagtacaacctagcgctatatgtggaggtgtgaaagatgaaactaatatttcaaatgggaaaacaacctgttcttgaaaaaacaatccttctttttatattgagtattgtagaaagcttgaagttaaaagttgtttcactcgacgaagctcaccgatacatattcaatttagaagtacttgaattattaatggatcggaacatcgatgatcaagtacttgaacttattcatttcgggatgggacttgaagacatttatcatgtgcttcctgaagaacttgagcatacgattgaagaattaaagtggctttgcattcaagtattaagtgagtacagtatgcatgaagaatccgaacaattaattgaagatatacggtaaaaaagcacctatgtaggtgcttttaatgtttttttaaactatttttatacgcctcaatatttactggtagctcttcctcttccaaagtatgttcatttacatctttatgaatgaacgcacctttaggtggttgatgatcatgcccttttttcttatgatcaaatgctttcccgcgtcccatacaaatccccctttcttaaaagaaatccgtattagtatggagaaaagtacgtcgatatatgcaatctcttgctgtatttccaaggaaatactcgaaccttgttttctactctccttacaacaactgatcgatcccaataagaattaataacactcctgcgataactgtcgcccatttccctaagtattctgctaaaaatcgttttcctacatacgcaaaaccactaatacaaataaaactaaacaccccagaaatagtcgctgtaagccaaagatttaaatttgttacccctgcatcaaatccacctgcaatattattaatagacaacgcaactcctaaaacaattgcttctgagaaactaattgttttagaaccatcaaaatctgctttttccggatcacgtaaaattcccataagtacattatcatctttagaacctgcagtatttttttggcccaagaaaggctgacataaaataaacacaccgattatccctaaaaagattgctccaatcagatttgctgtaaactctgaaataaataacgcaatccagtttccaaaaaatccagctagtaaagtaaataaaaatccaaagaatgcaatgataaaattgttaaaccacgaaatacgaattttacgaatgccatatgcaattccaacacctgcattatctaaattagaagcgatcccgattaaaaaaattgaaaataagcctaccgtactcataaatagtcacccctttttctcacttttcaatgcatattatgaaaatgttgagcaactgtgcctgtctgtttcatatacttgtaataaatgctcaatattttttcaacactaaaaaaggagtgcctacactatggctaatgaaaacccgaatgatcggcttggcaaattaataaaaaaacttttaaaagaacgcgccttatctatgcgccaactaggaatacttacaaatattgatcctgcaacagtctcaagaattattaatggcaaacaaccgccaaaacaaaaacatctacaaaaatttgcagaatgtcttcaagttccaccccaattgttatttgatgaaatgtaccctgattctcctcacataaataaagaaaaaacagatatgtacacatctcttgataccattcagcaaacgctgcaatcctctaacttattcgatttcgattacactacaactcgcgtaaaacaagaactcgaaaattacgaacgctatgcccagacaacagaaggtgaaaaacgtattcataacagtttcgcaagcaaattagagcaaattgatagtgcaggtccttttattgaacaattaacagatatgtatcaacaattttgcaatgaaaccatttcaaaagaagaacgtgcagttcttgggagcgcattactttatttcattttatcgacagatattattcccgactatctctttccaattggctatttagatgatgcgatcgccgttgaattagcaaaagagaaattacttgaaataaaacgaaagacatagcaaaataaagaactatttcagttgtttatattcaactctgaaatagttcaataaaaaatcgtacaagtatacatactcgtacgattttactatacaaatctattttttcgtgtggcaccattcatatataaatgctgttatcacttttgtaaattcaattaactgttcaacttcaactttctcatttacagaatgtgcttcttctaatgtacctggtccatatataatcgctggaatgtgaaactcactaaaccaaccgccatcagttaccgttgcagacatatctaaaattgcattttttgataaaatagactcgtgtactgagctaagtttttttacagctgcatgttccctatctacttctaatgaagggaaaatttcaccacgatctacaatcattgattctccgccccacttaaattgtggcggattttcacttaaccatggatcggcagctgctacctttccaatatactcttcaatttcttttattatttgttcatgtgtttcgttcggatagaagtgcactgttatccataactggcactcatccgcaataaacgccgcatgccttcccccctcaataacagctggattaattgttgttgttccagatggatagccttcatatgttttcatgactgcccagtggcgctctaattcttgtaaactttgcacaattttcatcattttttcaatcgcactcgctccgaataaacgtccccctgcatggatcatttgcctacgtgttgcatcatgaaacgtttgcgggcttttcacagtaatccatccagtaattacgccgccctgtccttgcatatgtaaatcactcgtatccactacgactgcaaaatcagcatcataacctcgcctgcagcattgaagcgtgccagcttctccaacttcttccccaattacggattgaaagattacatctccaggtaattcaatgccagcttcttgtaaaagctgaatagcaaatagtgccccagccaatccccctttcatatctgccgcaccacgtccaactaaccaaccatcttttataaatggctcaaacggattcatttcccacgcctcatctgctgtcacttcagctacatccatatgtccattaataataagacttttatgtgtgtcactttctatcccttttttcaccccaacaacgttcggatcattcggatatacatcccatttatcaacactaaaatttcgttttcttaaaaactctgcaacaaattcttgcgcctcatttgtgtttctcgccggcggtgctagtgtttcaaaacgaattaaggtttttgtaagctctagtaactcatcttttcgtaaatcaatctgttctaatagctgtgaaacttcttgattcatcgctaattcccctttgcatacatagtatgtttccagctttattttcacaaaaaaagagactgtttacaattttacagtctccaaattactcaatattataaactttctacttttgttgtattgatcttttcaatatgctctactttacgtaccttatttcttgtcgcacggtaaaacagtaaacaaacaatcataaatggaattccacaatataacgccattctttgctctgggataaaagccatagcaactataactgttatatttaatgctaatgccagaagtggtacgaatggatatagcggtgttttaaatttcaagtccttcacatctccgccctgcttaacatatgcccttctagctaataagttagataaagcaatagatgcccaaactaatatcgccccaaatccggcaatagaaagtagccataaataaactgtatcttccgcataaatacctgatagtaatgaaagacagcctacaatcgtgcttacaatcaatgcataaataggaacaccatttttagataacttaccaaaaatcggactaatcattccttgattagacatagaccatagcatacgagaagttgcatataatcctgaattcgcaacggatagtactgctgtaataataacgaagtttataatatcagctgcataaggaataccaattttatcaaatacaactacgaatggactttctatcactcctgcttgctgccatgggaataatcctgcaagaatgaaaatagataatacaaagaacacgagtatacgccaaactgtattattaattgcctttgggattgttttttctggattttcactctcacctgctgcaataccgactagttctgttccttggaaagaaaaattaacagcaatcatcgtaattaaaatagcggataatccatttggaaacaatccaccataatcagtaaaactagagaacattggtgctggttcatttcctttcatatctagaaaaccaaacattgctgccccgcccaaaataataaatgcaatgattgtaattactttaatacttgcaaaccaaaattcaacttctgcaaaacttcttgaagataatgcattgatagcaaagagaagcaccgcaaacgctacacaccaaatccatgacggtacatcaggaaaccatcgtttcattaaaatactaactgcaatcagttcaatacctatcgtagcagaccagtttaaccacgacatccatccgactacataacccgctgcaggggaaatgtgcttcgttgcatacgtttgataagatcctgcgtcgggcatcgcaacagctaactctccaagacagagcatcgttaaatacataacaaaccctccaacaagatacgctacaattgctcccccaggcccagcttcatgaattgtatatccagatcctaaaaaaagaccggtaccaataactcctccaagtgcaatcataaatatgtgcctgcttttcaattcacgttttaaaccttggttttgatccatcatataaatccccccttttccctttggaaacccatttcatgtaagcgtttttaaaatcattcataataaaaatgattattgaaaagagtgaaatacatagcacttattaatcactacctgttattaaaagatcatccctcactgttattaataactttttatcagcaatggcttgtccttctactacttctaatgattcgatatacccactgattcctaccttaatttctactttctgtttatctattgtttcaattaacgctaatttctcccactcgtatacgtatgaactttccgcaacaaatagcttctctacttttccataacaaggactatacacaccttctataactgtcttcactttataaattcctccctcttattaattgacaccaaaacgttgtatatcctgtaaaaattcatattctcccctctagagatttcgaatattatttatgcaaaatacgtaccaagtctctgattcatatattaaatgagagtttcacacaaaaaagtgtgcacaaccgcaaaatttttctatcatttgaaaagttttaagagaaaaatagcaaaaaaattttgcgattttataagaattttaataaaattataaaaagtcagtcttcatagggtgaaatgaggagaagataatctatgcgtacagaagaaattaatttaaaacagatcgttgaaatgaatatgctatatgaaactttactcaatgagctcgatatcgggattcatattattaatgaggaaagtaaaacgattatctacaaccgcaaaatgatggaaattgaatcaatggaacgctcagatgtattatataaaagtcctttagaagtatttgcatttgaagaaaataaaaatagtactcttatagaggcattaaaattaggaaaaacaaacaaaaatataaaacaaacgtattttaacaataaaggacaagaaattacaacgattaacgatactttccctataatagaaaatggaaaaattaaaggcgctattgaaatatcaaaagaaattagtcacttaaagcagacgataaaaatgggtccttctcgaaaacaaagcaccaaatttacctttgatcacataattggtgattctaaagccattcaatcaatcattacagaaggaaaaagagtaattcgtacatcttcctccatacttctagtaggagaaacaggcactggtaaagaactatttgcacaaagcatccataatgaaagtcagcgttcaacaaaaccctttatttcacaaaactgtgccgctatacctgataccttaatggaaagcctactatttggcacaaatcgaggtgcctttacaggagcaatagataaatcaggcttattcgaagaagcgaacggaggaactttgttattagatgagattaattcattaagtccagcacttcaagcgaagttactgcgagctatacaagaaaaaacaataagaagaatcggaggcacacaagaaaaagaaattgacgttcgtattatagcaactattaatgaagatcctcttgaagctattacacacaatcgattacgagaagacttatattatcgattaagcgtcgttactttatgtcttccgcctttacgtgaacgaaaagaagatattccggctcttgttcagcactttatcgaaaaatacaatattcaattcggacttagtgtaacagatgtagatgtgcatgtaagagagtttttatatgcatatgattggcctggaaacgtaagagaattggaacatatcattgaaggttcaatgaatttagttgaagatgaaaacatcattacagcgtttcatcttcccactcgctttcgcgaacgaataaaaaaagaattcaatatgcaacctttcttaactaataacgatactgatacgcctaaaacgttaaagcacacaatagaagaaatggaaaaaaactacatcaatcaaattctaaaagagtatcacgggaatatctcacaagctgcaaaatttttaggattaagtagacaaaacttacaatatcgaattaaaaaactgcatttacacatatgaaatgaaacttggatgagtggattgctagccctaatcaattcgacttttattgcttgttaatgcagcataaatctgctttaacatacaaataaacacttggtaaaatatgctacaataaacatataacatactagaaaggagcgatatatatgagtaatgataacaaattaaagttattacaatacttagccttcttccctaccattgtatgtatgatgttactaattgatataaacgcctatccttatgcaaagctattagcaacaattagtggctcctttgcagctattatgcttgctgctttttggaatttgaagctacgtataaaaaacgagaaatcttcgtaatacaaaaaaaatcgagctacttagcccgatttttttatttgccattaaaactcaacattctctaaatacaacccacttgcctcagcaagacaattaatttgattgcgctgcttttcctctaaaatgtttggaattgcttcagcgtctaattgtcctaatccaacttcaattaatgccccgacaatttttcttaccatattatgaaggaagccgttaccacttactctaatttgtacaaaccctgcctcttccatcacatcaagtgtatatacttctcgaaccatagattttttctttgatttcgcatttgaaaaagcagtaaagtcatgtgaaccaactaaatgtttcgcagctgctttcatgcttttcacatttaattttttattcacatgcatgctgtatttacgcataaatggatttgtatgctcttcattccaaattttatacagatatgtttttgctttagaattgtaacgagcatggaaacgatcatgtacttcttccacattcgtaatgctaatatcattaggtaaatattgatttaaatattttttcactttatgttccactaacttctcatcactttgaaagttagcaacttgattcaaagcatgtacaccagcgtctgttctactacaaccaataatttcaatttcttttccgaccatttcagatatgacactttcgatttttccttgaattgtattatcgttattaccgagacgttgccatcctttaaaacgtgcgccatcgtactgaattgttaatttataattatgcataatattctccttcatagaaaatattccctcataccatgagggaatattaataaactttactttctaacaagcttcactacattttctacgtgagctgtatgcgggaacatatcaactggttgcacatactccacttcatagctcttcattaatgcttgtacatcacgcgctaatgaagaaggattacaagacacatacacaacttgtttcggcttcacctttaaaattgtttccagtaatttatcatcgcaacctgtacgtggtggatcgacaacaattacatctggacgccatccttcttttacccatttcggtaaccattgttcagctttacctgcttcatatttcgtatttgtaaatccgtgacgcttcgcattttttcttgcatctgcaatcgcttctggaattacatccataccacgtacttccgctgcatcatttgcaagccaaagaccgattgtaccaacgccacaatacgcatctacaattttctcatcgcctgttaacgcagcggctttttttgcttcattatataaaacaacggtttgctctggattcaactggaagaacgcacgtgctgataattcaaatgataaatcaccaagtgtttcttgaattacttcttttccagctaatttaaatgttttgtcgccaaaaataacagatgttttacgccagtttacattttgcataattgatttaaccgctggcatctgtttttgtacttctgcaataaattgttctttatttggtaattcttcttttgttgtaataagtgtaacttgtacttcacctgtttgaactgcagtacgtgttacaattgtgcgtactaaacctttttgttttttctcattgtaaatagaaacatttaatttttctaaaatacgtcttacaacttttgtcgcttcattcgttgctttatgttgaatcatacagtgagcgatatcaattaactgatgtgagttttgtttatatagccctgtaataaccttttcgtctttacgccccacttgtaattgactcttattacgataatgccatggattttccatgccaagcgttggacgaattttctcttccatactatttttcatgtacttctcaaatgcttgtacaacgatatcacgcttttgattcaattgttctttataatctaaatgttgcagctgacaaccgccacactcctcatatactggacacggtgctttcacacgatgcggtgaagctttacgaacttttttcactttcgcttcagcgaagccacgctgaattttcgttgtttctgcaacaacttcttctcctggtaatgcccctggaatgaaaacaacttgtctcttaaaataaccaacgccttctccgttaatcccaagacgtttaattgtcacaggaaacgtttgaccaacttccaacttactctcatgttgcttttgtatcattattacacctctactctatacttttccataaatataacgctgcataactgcagtatggttcacactcttgtttcaatttttctaaaaatgcatcatcaggtttatcatctaattgaaatataccttgcactgcacgctgaatcccaatgtccgctttcgggaacatatttttccgtccaagcccaaacattaaaaagttttgcactgtccatgcaccaattcccctaattggcaacaattgtgctgaaatgtcttcttccgtcccattttctatactcgctaaatttaatgtaccactgacaatacttcgacctaatcctactatatattcagcctttcgctgactaaacttctgctctctcaattcttctattgaaatatttgctactatttccggagtggggaaaaagaatacaccgttcttctctgttccataccgtttcacaaattgttctgttaacacagtagcaaatttcaaatttatttgttggtgaatgatacagcgaagcagacaagcaaaataatcaaattctaaaataattggagtataagcatatgtttcaaatagtggacgtaatgatgtgtttaaaaaatgattttgtatatcttgaaacggttcattccaatgaaaaatggctctcattcgtttcatgactttctctggatctcctgtctgactagaaatccaaaactgtggattttgaacagtaccaatcccttgtaagcgaacaacaacctgttcctcgtcgatacaaagcgggatataaataactttctcatctaattgaatgacgttaagaggatcaaaagataaacgttttaatacttcttcaaaatgatacggatactctaacgtaacatgctcgctccacatacgtttccccatcctttttacacatcattatagcatgagaaaaccgtaagcatacatgcttacggttgattgccttttactaagtcatctagacttttaaaatgataccctttctcgcgcaaatcatcaatgatttttgcaagtgcttctgcattatcttttgatattgcatgaagtaataaaatagatcctggatgaatcatcgtcataacattattatgcgcatattgccatcctctttgctgatccactttccaatccaaaaatgcaagtgaccaaaatacattataatagcccatttctttcgtaagagctaacgttctttcactaaatacaccgcgcggaggacgtacatatttcacttctttttgcccagttacttttttaatttcttccgttacactcgttaattcttcacgaagtttctcatcatttaccgctgtaaaatcaggatgactccaagaatggtttccaataatgtgtccttcatccttcattcttaacaataaatctttttgtgttttaatgtaatgccccgttacaaagaaagttgctggtacttttttctcttttaatacatctaatattttccctgtgtatccattctcatatccattatcaaatgttaaataaatatcttttttcttcgtatctcctaaataaaacccgccatttttttgtagtaaatctgtatataactttcctgcatctggtactgtttcatttttaggacgcgggattccccagttatgtggagtatttgtataagccagtgctgaaactggaacaagtgccatcataattgaaaaaatgagaccgatatataaccatttatatttcataaatagtctcctttccatatataatcgtacttgtagtttctgttgcaacgcattctttcatgctgaacatgtttttctatatataccaaaaaaatgcatctcgaatcattcgagatgcattttttatttacttaaatactggctctttaaagctagctaatttttcaagtgatgttttatcaacatctgcatgtaagctattaccatgagagtccatcgttacaactgctttaaaaccgtcgatacgtaaatgccacattgcttctggaataccaaattgtaagaaatcaacatctttcacttctttaatacattcagcataatattgcgctgcaccaccgattgcgtttaaatatacaccgccatgttcttctaaagccgctaatgttttcgcacccataccgccttttccaatgacagcgcgaataccgaatttcttcataatatcgccttggtacggttcttcacgaatacttgtcgttggacctgccgctttaatttgccaattgtcattgtcatctttcacaacaactggaccacagtggtaaataatttgtccatttaaatctactggacaatcattatccattaaatgcttatggattgcgtcacgacctgtatacatcatgccattaattgttacaacatcaccaacgcgaagttcacgaatttgctcttctgtaattggtgcttctaatacaatctcacgttgctctgttttttcttgtacttcatgctgaagtgtatcttccccttcttgatatagccaatccataatgtctcctgtttcaggatggattttcacaccaaggcgacgatatgcccagcaattatacgcaacagatacatagaaactagctggcaaacgattatagacgccaattttacaaccaagtaaagttgtttctccgccaaatcccatcgtaccaatgccaagcttgttcgcattttctaatacgtactcttcaagatgttgtaactctggtactggattgacatcatctaatgtacggaataattgattttttgctaattcataacctgatgtgcggtctcccccgataccaacaccaattacaccagcgctacatccttgcccttgtgcttgatatactgcatgaagaaggcatttacgaatcccttctaaatcacggccagctcgtccaagtccttctagttcacacggtaagctatattgaatatttttattctcacagccaccaccttttaggattaaacgtgcatcaatataatctttttcccattgttcaaacttaatcaccggcgtacctggtcctaaattatttccactattatctccaaaaagagaatcaacagaattgggacgaagtttaccatcttttgtcgcccgctcaagcgcattatagatagcttccttcaactttaattgattcacaccaactggtgtataaattttaaacgttggcatccctgtatcttggcaaatcggcgagatgttatcatcagccattttaatattatttgtaattgtgccaagtgccatcgcagaacgagtccctgcattttctcgctctttcgcttgttgaatcgcacgacgaacatctttcggtaagttcgttgacgtttcaacaattagttgatacatgctttcttgaagcttttccattgttacttccccctcaattgtgaacgctaccaaaacgttatgagctgaaaattcaattgttatgctctttagctatttatttcacgctattagagcataaatgaaatttttcacaacttgattatacctctttttctatcgtccttctattacccgaacagaaaaaggctaccaaattggaattggtagcctttttaatatattattcgtcttttttaaattgctcacattttaattctaattcatctaacattgcaagaagacgatctacatcttctaattctacttcttcgggttcaattgtatcaattacttcaatgaacatatttaaacgttcttttaaatatactaattgtgtatctttatcttgaattgcttttcccatgaaggcactctccttttaattcgagttgcttttattataccgcaaaaacgattgctatgggcatgaaatttcatcaattttgtcacagtcatccactataatgtaagccctctctcttttcatgctaaaaagtttcactttataaaaagcacatattcttctattatagagaatggacaaattgttatttcaatagtcaaaggagtatttcatatgatgatatcacaaaaaatgaagccgattactccttcttacgatccatgggaagcgtatatggaccttgaagagtacggcaaactactattaacaaatgttgagtttacaacgacgacgttatgcaatatgcgctgtgagcattgcgctgttggttacacgttacagccgaaagacccgaatccgcttccgatggatcttttattaaaacgattagatgagattcctcatttacgttctttaagtattactggcggcgaacctatgctttcaaaaaaatccgtcgacaactatgtaacaccactcttaaaatatgcccatgaacgaggcgttcgcactcaaatcaactctaacttaactatagatttagcacgttacgaacagattattccttatttagacgtattgcatatctctcataactggggaacaattgatgacttcgttgaaggcggatttgcaatgatggagcgtaaacctacttacgaacaacgtgcaaaattattcgaaagaatgattacaaatagtaaggctctatcagatgcaggtgtacttgtatctgccgaaacaatgctaaacaaaagaactctaccacatattgaacatattcaccgccaaatcgtcgaagagatgggctgtaaacgtcatgaagttcatccaatgtatccaagtgacttcgcgagtaatctagagattttaacaaaagctgaaattcgtgatgcgattgagcatttactagaaattcgcgatgaaaatgtatggatgttatttggaactttacctttctatgcttgtagcgatgacgagcgagacattgccacatttaaaaagttacaagagagcaaaaatgtaactgttcgtaacgatccagatggtcgttcacgcttaaatgtaaatatttttgatggcaatattatcgttactgattttggtgatgttccacttctaggaaacatacaaacaaacacattacaagaagcgtatgaaaaatggagcgcttcaaaaacagcaaaatcattaagctgtcactgtcctgcagtaaaatgtcttggaccaaatgttcttgtaaaaaacagctactatccgacagaagatttcttatcaaaaacagcaaatattacattataaaaaaacgtcagcttataagctgacgttttttcatgttattgcgagtgggaagaagaaatgaatttaaaatacaaataatcatgaattgggatagcagcaccgattccttgagaagtaatattttttacaacaagccttttttgatttccttttaatacaaggtatacttctccaaatgttacttttcctttttcatttactgctggtgtataagcatataaatatccaagttgactcggactaatattatacacacgctcatgccctgtaccataaccaatagtcgttttaaatgaaagcggcaattgtactttttcaagtgctttgagaagcatcatttttttcacatctgcagcatctttcatatctgctgttaaatcgccttcaaccgtcttttgtgtttcttgcttatagcgaagtggatataaacggtctcctccgcgattatcatacacatttcgattcacttgtttatattcccaattaatcgatgtgtctactgattcataatgtaaagcccattgacctaaataaatttttgcccgataccctactgcaagcggcgcatttgaaattgtcgtttcattaaacatccgaattaagtctggattttcaattttaatattagccgttttcaatagctcttgagcaaatttacttggttgtaaacgtggcaaatcttgcgcatcatttggaaatgtattgtcttttgaaatatttaaaacagatgaaggcatttttgttcctactgttgtctttgcaaaactcatgttaggaaataataaaataaacgagaccatagttgaaagacatatgctgtatactcgtttcacctgtctggctccttcctatgtaggtatatatactacttcgtttattgttttctctgagcgcaattgttatgcctatttttcataataaataaaaaccaattcccataatgacatacgccgctagtaaagtgccaccttcaaaccagtttgtatctccatcatttgaaatcgcaatcgttaagaaaacggctgtaatcatagacacaagttctggtatagtaaatactaaaggcatcctttgcgcgaagaacatagatagcaatactaatacaggagcaacaaacatggcgatttgtaatgtagagcctattgcaatttcgactgcaatatttactttatttttataagccataataattgcagacgcatgttccgctgcattcccaacaatcgcaacgataataacccctataaataactctgaccaaccaaatgactttgcaacagtttcaaaagtatgtacgagtgcctctgacacataagctactgccagtgttgctatcgctaaaataaggagcgccttcccttttgaccactcttgctcttcttcatgcgctacttcgtcacttttatgttgatatacaccacggtgcgtaactaacttaaatagtaatgcagcaaggtacatgataatcataataatagaaacacctatacttaattgatacgtcttgccagcgtccatcttcattgaaaagatctctggaataacaaaggccacaacaacagcaaatattaataaagctgaattatgccttgcatcatatacattaaaactttgtcttttgtatttaagacctccaacaaagaaagataaccctcctaccaataataaatttccaagtacagaaccggttaaagaagctaacaccacttcaattaaccctgcttgaagtgcaaaaattgaaatgataagttcaacagcattaccgaaagtagcatttaataatccgcctattctaggaccagaaacaattgctaaactctctgttgctctccccataaaaccagctaatgcgataatcgtaatacaatacacagcgaacataattgtttctggccaatgaagtgttttgccaagtacagatagtggtacacctataagtgctactataagaaatattttattaaacatgcttttcatccttccatcgtatgtatttctcctcaatattattattattcttctcctaacttgtccgatttcatcacgattacgtttaaaaaatcgacttaaagaaaacagtatgaaagatatttaaattatcttgtttaaacagagaaaatataaattaggaaaagaggtaaagaatatgcacttaaaagagaaaattgcaactattattcaaggacaacgtactggtgtattatctacagtacgtaacgagaaacctcatagcgcctttatgatgtttttccatgaagattttgtactatatgttgcaacagatcgaaaatcaaaaaagataacagatatcgaaaaaaatccaaatgtacatgtactacttggacgtgaaggaaaaaaattagatgaagattatattgaagttgaagggttagcttcaatcgaggaagactcaacattaaaaaacaagttttggaataatagcttaaaacgttggttactcggtcctgaagaccctaattacgtattgataaaaatcaatcccgacacaatttattacattgatggtgccggtacgacggagcctgagtttttacgactataaaataaaacaagcccctccttaggtgggcttgttttgtcgaaaagttctttttgaaaaaacaataaaataggtggaactttctaaagattctgttatataatagcagtaacttaaataaactgtattaaaacagattgagaggagaaataaaattgatgaagagagaagaacgcaaaaacatgattgagtttattgaaaagaaaaaagggattgagcgtgacgaattactgtttatgacagacgatgaagtagaacatatttataatgtaacgtactttttatatgaggaaattgcagagtagtataataatccccaccttattaaaaatataaggtggggattatttcgttatttagcccactatttgcaggcagtaaaactcccaccttaaaattcaggtggagcaagaagttaagttgaagtcgcacttcctataaagctcaattgcttcaactttatacatgagaatcattttcatgtataatactgtaagattggaggaattttactatgagttcgtggctcttatttgcactattatcagcaattgctgctgcccttgtatctatttttggaaagtttggtttagacggaatcgatgcaaacgttgcaacaacaattcgatctattattatggcattatttatgataggcgttattatcatacaaggtaaatttcaaaatatcggcgacgtactgctaaataaaaaagcactgctatttatcacattaagtggggttgcaggtgcttcgtcatggctattttattttcttgccctcaaaacaggaaaggtttcacaagtagctcctgtcgataaattaagcgtcgtattttctatcattctcgctatgattatcctcggtgaaaagttaaactttatgaccggtgttggtgtagtctttattacagctggtgtattatttattgctttcagctaaaaaaaaccgctattagcggtttttctttttctttatgtacaaccatacaacacatgtaacaactgctgaaattaataaaatccatattccataatgatgtaaactatactcaacgaagcgccacttctcgcctaacttccagccaagcccaataaaaacacttatccaaataagcgcaccaccataagcgtacaaacaaaaacgccaaaatgtcaaatttgatactccagcaaaatatgccgttaaatgacgtactcccggtataaaataaccaatcattaaaagaaatggcccatatttttcaaataaaatatgtgttttttcaatgtgatgttctttaattctaattttcggcccatatttctttaaaacagggagcccaagttttaaacctaatatgtagcttaacgtgatccctaacatcgcaccagccatcccacttaaaaaagcagcagttcctgacataactccttttgaaacattataaccaacaaaggtcaataaaaactcgtctggtatcggtaatccgacaatcccaccagccaaagctataacaattccaaaatagccataatgcgcgattaactcgccaatatgttgttccattcggaagacacatcctatgcacgatcgttattccacattgtaccctttctatctttaaggcaaacatggtatacatattcactatacattgtttttataatgaactctacttctattctttcctttaacagagataaagtgaaactttaatcagtgggagttttgtttatcctctactaattattaacctatgccaatcttgcttctatagacatcccgactcccacataacttacttacattcaacaattttgagattagattcttactgcccgcaaataacccgataaaaaataaaaattcatatgcgtgtttttttgttacaataaaggaaagttacttttcgcaacggtttaactctcaagaaaaatgatatatctagcaaaaacatagtttggtctatataatgcaacttctacctattaaaagaacatacacccttttacatacgacatcatttttctaaattatacaggggggaacgaacatgaccattgaaaatcaatttattcaaaaagtttactataaaacatttttaacagaagaaacttctactcctgcatcggaagtactcggtgaagcatatataaatgaatctaaaaatgaattctccaacatttctaatattcgatttgctcaaggtgaattttattatcaaaataaagattttgaagcagctatatttaaatgggaaaaagtaaataatgctcttgcactttgggcgacaaaaaatattgcagatgcttattttgaactaggattcttaccaaaggcagaagaaatttatcaatctattcaaacggaagatacaactcttacgatggaggtttccttacaacttctttctctttatatcgaacaagatcgtttaggactcgcttttaagacgattagtgaagctgttgcattccaaccggattatccaaatattactgcaattgcacgttctttctatgaaaaacaagaagattggaacaacgctatcgaactagctgttcaagaaggtattcgaacacaatctttacactggtttgatacgttaataaattacataaacaaaggatttacaaaaaatattaagcctgaatatttctatgagtctttaaaagctctatatgctgttgatcaagctcaatttaaagagcttgttattgctctttggaatagctatcaacatgaatccttataccttccttggattcaaagtattaatcatttattcttgcatattgaaacagacaataatgacgattggaatgaaatttctactcgctatcaagaaacatactttgcattaattaccggaaatcattttatgcatgaattaaacggacttgtaccaaatttattaacaaattggtttagtttaacgaaagcaaaagattctctagttgtctctgcagcagtgttagcatggaatgaagtctcacctacaactttagaatcattactcgtaaaaagtgctggatccttactttctaatacatcagctgaagcagatgtaaatatggaaacagtttctcatttattcgaaacaatcgctgtatgggctgagaaaaatgatgtagatttaagtcatcaatttacgctactagtccatgaactatgtgatttaaatgtcacaccactactaatagctggaactagtgaccatgataaaacatcatttgttaattcaatattgggagagaacatcttaactgaaactttaacaactcctattctatttaaagacgctagtcaaactgaaataacagaatttaccgagttagatatacgaaatatccctaaccttgatgaattccatcaaataacggctacatctgctcagtcagaacttgagaaaaaatgtatagaaattaagctaccaagtaggtttttaagaaaaaataagtttacatttcttcttacaccatccattcaagagcaattggataaaaacaatgcatactttgaatacttacaagcagcagatagtcttgtttacgtattaaattcttcttcaccattgcatagtaaagaaattgatacattaatttatttacgtgaacaagtaccaaacttacaaattcacttcgtattacacacaaataatacgactactaatgaaaaactaattagtaaacttaaagtacattttccagatgcacaattcttcccatactctccttcgcaagagagtagccagcaacttggagatgtaacagaatctattctctctaatcttgcaaaacgcgatatagaaaaagaacgtatagaaaagctaatatggtttacacaaaagacaattgcttatctcataaatgaacgtgtggaattagaaaatacattagtaaaatccgtacgctggaataaacacatctcagtgaaacttactggatttattaataaccttactgctcttgaaaaagataaaattcgctctattaccgaatcctatcttttaacgaaagaagaaattacacgagatatacattctcaaattcctgaattattacagagttgctctgatcttgttcaagaagatagtgatttcaaactagttcatgaagaattaaatgctgcaatgaatgaacgtgttcaaaagcatgtacaacaggtacttcttcctaaatttactgggtctattcaagaatggattgaaacagcacataatgaatttattcaagctcaagcttatttagatgaaatgagtgaaacgtttaataaattatataaagaagaacgtatgaaacttccttgcgatttcaaattattagatgattggaatcgagatgttgcacgaatgacaaatcgaattacagtaacgaacatcaatattttattacgctttacaccgacacagtttttcttaaaaagtgccggaaaattatttggtaatatgcaaaaaaaccaatctatgctcgccaacaaatataaacaatatattgaaacagaagactatacagaaattgctcacacaatttccaaacaattcttccttcaatttgaagtatttgaaggtgcattagaacgtgatatcatgatgttcttcaaagatccacttaatatattgaaacaaaatgtagatgcagctcaacttgagatacaggaagacgagcaaacattagcgacgctaagaagcaatccagaaacatatcatgatcctttggcgttatttaaactacaattactacaacataaatttgttttaagtactacaaagaaacatgaagatatctttgtatcaaacgaatctcctactgtttaacaaaaaaaccaagcaaactaaaatttgcttggtttttttactttattattttcatatgttcaaacggataataaatgcctgctaactttcctaacacatcttctctatcaataaaacctaaaccatttctactatctttacttattaagcgattatctcccataacaaaaatcttatttttaggaactgtaatcggtccaaagtcctctgttaaattcataagttttttttctgcttgttttttattactatccaaatactcttcatctttcatttcagaatttacatataattgatcatttctcatctcaattatatctccaggcaatccaatcactcttttgacataaaaattatctgttttcacaacaataatatcttctctcccatagctttcaaattgttttgctaacttattaacaatcaccctatctccatcttgcaacgttggcctcatagatgctccttttacagtcgtcggaaaaaacacaaaaattttcgccaaaaacaccaataaacatgcaattgcaatagttccaaagaattcacgccaacgttttttcttttgcatcatttcaccaactcatcatctttttacttttattataaataatacgaccggtgattttctacaaaattctgaattgtaaaattataatattagaaatttcacaataaaaatactgatcaaattaacaagcaaaaaagatactctcaaaatagtctatccactatttttgagagtatctttttataatcccacatatacaatacacatttgagcagctacatatgtaagccaaatccaaagtggctcatacttcaatttacgccctccgatatctgtcacgccaataatgaaatcagaaattacaaacagtaagccaccaaacgctggtatccaccatatccctgtattttcataatataaggcgaatgcaaagcaagccattcctccaacccacaatccgtaaattagagctcctatcgtaaacaacttatcctgtttatcatttcggataaagaagaaccatcctacaattagaaagagcccatatacgagtaagccaatccaaaaaccattccatgaaattcctgtttgcaaaaatgcttttacataaaaacaatgagcaagagcgaaagtaaccatccctccaattaatcgatgaccaattggaatcagcccagccataaacaaatctcccacagtcgataaagtcataccaagtgcaacccacgtactatactctacagatggatcttgtaaccatatgcaaattgcactacctgttaaagaaaaactaagaataagacgaattgctaaaggtaacggcatattatctttcgttctttttgtctgccccattgcataaattgcaccaataaaaaaaagaaatatttgcccaattaacaccacgtaaagtagattcataatattttctcctcaataaatgctttttgtatcttttttcgttacacttagtctattatcctttttctatgaaaaaagaagaacagtactgttcttccattgtaatcgcttttctgctctctatgctacttgtttttcttgctccattttttgcttagctggtgtcctatttaccacaatgattcccgcggctacacatgctaaaccgagtagcacaaatgaatgaattgcttcacctaaaatcatgctcgataataacacaccaaatacgggtataaagaacatatacatagatacttttccaaccttgttatacttcataattgtattccaaatgcaaaaaccagctgcagataagaaagataaataaattagcataagtagtgcatgtagactaaatgtaaatggcatgactccaacttgtaaagcccctatacataataatcctatagaaccaaaaatcatttggtatgctgtcatatagccaacatctaatgttttactaccttcttttgctaatatgtttccatatgaatacagcatgctgcactaagaagtaataagcttccgatcccaaaatgaaatgataagctaccatcactcggcacatttactaaaatgacgccacaaaaaccaatagataccccaattaattttctcatattgagagcatcatctttatataaaaaatgggcgagtaaaatttgaaagaatgatgatgttcctgaaatgatagctccttcaattcctgaactataactcattccaatgtaaaaacagatatattgaagaaacgtttggaataaaccaatttgtattaactgtttccctgttccttttttgaagctcatatcttttcctaacactttaaagaataataagagcatgactccagataaaaagaaacgataaccggcaaataatatttgctctccaacttcttgtggttgaattccaagttcaacataacttaatttaataaaaggaaatgcgcttccccataaaaaagttgctactattgcagcaataaatacgccaatcggatgggtaaaaattttctctgtcttcacttgttgtcttcctttccgatctttttatgaacaatattcatatataccagaggagttgcgaaaacacaagttttccgtttatacttgaaacaaaaccgtaccatctcataaaaacatatgatatactatagaataattacaacataagaactattaaaaacagattcaacagaaatgctgctatccattatggatggcagctttcgtcgttttataggggtttcgattttgattatttttctcaataagaatgcggaaggagcgggtagtaatgaactcagaagtaaaaacgttacagtcaaaagaaacaatttctcatccctctttatgggacacattaaaaaaacattatgaacttgtatttgcagtagcatctggtatttttattttagttggctggttattcacaaaaaacgatgtaatgaatgtaggtattacttgctatatccttgcttatatagttggtggatatgcaaaagcgaaagaaggcattgaagatacgattgaagaaaaagagctaaatgttgaaatgctaatgctctttgcagctattggtgctgcaattattggctactgggcagaaggggctatcttaatctttatctttgcgctcagcggtgctatggaatcttatacattaagtaagagccaaaaagaaatttccgctcttcttgacttacaacccgaagaagcattacgcatttccaacggaacggaggaacgtgttcctgttggagagttacaaattaacgacattattttaattaaaccaggtgaacgtgttcccgctgacggtacgattcataacggtgaaacaaatattgatgaagcagcaatcacgggagaacctattccaaatgagaaaagacatggcgatgaagtatttgcaggtactgtaaatttacgtggtgctatcgaagttaaaattacgaagccaagcgatcaaacattattccaaaaaattatccgtctcgtccaaagtgcacaaagtgaaaaatcaccatcacaactattcatcgaaaagtttgaaggaacatacgtaaaaggtgtactactcgttgttgcgcttatgatgttcgttcctcatttcttacttgactggagctggaatgaaacgttttatcgcgctatgatcttacttgtagtcgcatctccttgtgcactcgttgctgccattacaccagcaacgttatctgcaatttctaacggagcaagaaatggaattctctttaaaggtggcatacatttagaacgcctcgcttcagtaaaagcaatcgcctttgataaaacaggaacattaacagaaggaaaacctaccgtaacagatgtatatgttcgagaaaatatgacagaaaaagaagtactttctattacagcatccattgaaagtcactctacacatcctttggctgcatctattgttaaatatgcacaacatgcgtacgacattacattaaaaaaacctgaaaaggttgaagatgtaactggttttgggctaaaaggaatattcgaaaacaacgcttataaaataggtaaagctgattttatcggtgaagaaacaaaaacatttcataatggtatttctgcctcacttgaaaaggaaggtaaaactgtcgtttatattagtgatgagggaggcattcttggacttatcgctttaaaagatacgcttcgccaagaaacaatagctgctattcgtgaattacaaagcattggtgtcgaagcaattatgattactggagataatgaagaaacggcaaaagcaattgcctctgaaagtaatataaaggaatattacgcatcatgtttaccagaaacaaaagttgaaacgattaaaaagttaaaagaaaaatacggtacagtagcaatggtcggagacggtataaatgatgcacctgcactagctactgctagcattggtgtcgcaatgggagaaggaacagatgtagctttagaaactgcggatgttgtactgatgaagaacgaactatctcgtctttcccaagcaattcgtttatcaaaacgaatgaaccgtattgtgaagcaaaacgtaatcttttcgctagccgttattgccatgctaatttgttcaaacttcttgcaatttttagctcttccattcggtgttattggccatgaaggaagtacgattcttgtcattttgaatggcttacgattattaaaaggcagcaaataaaacgggtccctcatagaggacccgttttttttaatgatagctattatgaccgttcgcactgctactcgttttatgctttggatgcgaactgctcttttgtttattattacttttattattatggttctttttattattactcatgaaatatcccccctgttcctttttattatggaacaagagctcattattcattacgggaattattgtcaccggttctataatggtggagtaaaccattaatttcaccgccaagtaaaattacccatccagttaagtaaaaccataacattaaaataatgataccaccgagaccaccatatgtattggcgtaattcgcaaacttatctacataataagcaaatgagtacgataccacaatccatcctacagtagcaaataacgcccctgaaataacttctcttctttttaactttcgatctggggcaaatgtatataagaaactaaacaaagcaaatagcacgaagaaactcgctactaatcgtgtaatgctccacacgaaagaaaaactatctgataaaccgagtgctttaaacactgctgctccaataacttgtccgaataccggaacaattaatgcaaagacaatcataaaaataatagctaatgtaaacacaattgataacgctcttgttgtaataaaagaacgtgtttccttcacgtcataagcgcggttaaaagcattcataaccgcattaacaccatttgaggcaaaccataacatggataataaaccaaatgataataaaccaccattttgctggtttacaactttatctacatttacctcaattaagttcattgcatcatctggtacataaacctctaataaactaagcacatcctctgtttgaatgggaataaatccaagaagcgtaattaagaaaacgagcccaggaaaaattgcaagcaagaagaaataagcgagctgtgctgccaagcccgctacatcatcgcgcatcgtccggtcatataaatctttaccaaacgaataagtacgatttcttctcaccttttctaaaatttttctcatatatgtttaaacgcttttcttctcttctttatcttgctttaactcaatgtacgcttcagtttttttttccactgcatttgagtctttcataaataattcacgcgcttctttcataccaccatcttcagcaactactggctcttcttctgctttcagctcatctacctttggagatacagcttgaatttcaatcgtttctggcttttcttctggctcaacttttttcttactaaaaatttctttcgtttcttttaacgtctctacaacagatggcgttaattttttaatttctgctactttcgcttttaccacattgaaatcagcaagttcgcgtcctttatctgtaacagtttgcactttttctttaatctttgcattttcaccaatttcaatcatctttgtttttgctttttctgctgtattttttactttttcacggttttctttctttaacatggatacagctacacctgccgctacaccaatcgcaatgtttcgagcaatattatttttctttgccatattccttcaccctttcatttcttatgttagaaagtatttctttctaagcttcctcatattccttgttcatttcgaatgaaagctaatagctttgcacacccttctgttacaaggtcatatacttcttggaaattccctgtatagtaagggtcaggaacgtctgtccagccaccgtctggaacaaagtcggacagcctaccaatatagcctccagttttacctaaactttttaaatctgctatattcttgttgtccatggcaataatataatcaaactttgttaagtcttctttttctacttgccttgctttaattccttcaaaagtgactgcattttcttttaaaattttttgtgttcctttatgtggcggatggccaacatgccaatctccagttcctgcagaatcaatgacaattttctcttcaagtccctcttttacgacaagatttcgaaaaatcgcttctgccatcggagaacggcaaatgttcccaagacaaacaaacaatacttgaaccatacttttgtttcttcccttcttggtgcatttctttatatatacttatagtataaacaaccaattattaaatataaaggaaatccctactaatttaatgggattgaaaagattcattaacgaaaatgataaaaaatgttaagatagccttatgttattttaaagggggacacttcggtggatttatccgtaaagtcagaagaaaacgttgaatatatggtcgaagctattaaagaaaaattacgtatggttaatgctggagcgatgagagctgctagttttaacgaagaaatgtacgaagatttacgtgacatttatgatcatgttatgaaacgtgaaacattcagcattagtgaaatgcaagctattacagaagaattaggtacattaattaaaaagtaaaaaagcctctcttatatgaggctcttttttatttccaacaaattcatgacaactcttctctttccctcaaccaactgtaaaatattgtacaatagaagtagaacctcaccttagatttttctccatacatactactcacaaataatagcaacactaccattgctaactgtttttactggaggtgcttacttatgagcaattggtacagtaagacgaaagatcaaacattaattgacctagaaacaaacgaacaacacggtttaacagatgaaattgtaagtgaacgtttaaagcaatacggttctaatgaattagctacaaaacaaaaacgcactttatggcagcgtattttcgcccaatttaatgacgtcctcgtatatgtccttattattgctgcccttatttctgcctttgtaggtgaatgggcggatgccagtattatcgcgcttgttgtagttttaaatgctgttatcggtgttgtccaagaatctaaagcagaacaagctttagaggcactaaaaaagatggcaacacctaaagccatcgtcaagagacatggtgaactaaaagaaattccatctgagcacgtcgttccaggtgatatcgttatgctcgacgccggacgatatatcccatgcgatttacgccttattgaaaccgcaaatttaaaagttgaagaatctgctctaactggtgaatctgtccctgttgataaagatgcaatctaccacccttccatgcaaagtgatgaacaagtaccactcggcgatcaaaaaaacatggcctttatgtctactcttgtaacatacggaagaggcgtcggtgttgctgttgaaactggaatgaactcacaaattggtaagattgctacccttttacatgaagcagacgatgatatgacaccacttcaaaaaagcttagcacaagtcggaaaatatttaggctttgtcgctgtagctatttgtatcattatgttcctcatcggttttttacaaggccgggatacgttagaaatgtttatgactgctattagtttagccgttgcagctattccagaaggcttgccagctatcgtttccatcgttcttgcaattggtgtgcaacgtatgattaaacaaaacgttatcattcgcaaactaccagctgttgaagccctcggttctgtcacaattatttgttcagataaaacaggtacgttaacgcaaaataaaatgaccgttactcacttttatagtgataacacatacgatcgcttagaaagtttaaatgtaaataatgatgcgcaacgtctattgttagaaaatatggtgctatgtaatgatgcgtcttataataacgaatcacaaacgggagacccgactgaaattgcacttctcgttgctggaaccacttttaacatgcaaaaagattatttagaaaaaatacatgaacgtgttaacgaagtacctttcgattcagatcgtaaaatgatgtcaaccgtgcatacatacgatgaaagctactatagcatgacgaaaggcgctatcgataagctcttacctcgatgtacccatatttttaaaaacggcaaaatcgagattttaactgattctgataaaaatcaaatattagaatctgccggagcaatgtctcaagaagctttaagagtactttcattcgcatttaaacaatacaattcaaacgatatggatataaatcatcttgaagaaaatcttatctttattggtcttgtcggtatgattgatccaccacgaactgaagtgaaagattcaattaaagaatgtaaaaaagccggtattcgcacagttatgattaccggtgaccataaagataccgcctttgcaattgccaaagaacttggcattgctgaagaacttggcattgctgaagaaatatcggaaattatgattggaactgaattagataacatttctgatacagaactagctagcaaaattaatcatttaaatgtattcgctagagtctctccagagcataaagtgaaaattgtaaaggcattacgcgcgaaaggaaatatcgtttctatgactggtgatggtgtcaatgatgcaccatctttaaagcaagctgatgttggcgtagcgatgggcattacaggaacagacgttgcaaaaggggcagcagatgtcgtgttaacagatgataatttctcatctattgtgaaagccgttgaagaaggtagaaatatttatcgtaacataaaaaaatcaattctcttcctactctcttgtaacttcggagaaattatcactttatttttagccattttactcggctgggcaacaccactacgacctattcacattttgtgggtaaatttaattacagataccctgcctgcattatcacttggggttgatcctgaagatcctgatgtgatgaaggaaaaaccacgacatgcgaaagaaagcttatttagtggtagcgttcctttccttattttcaatgggattgtcattgggcttttgacgctaatagcctttatcgccggagcaaagttctatactggagatacacatttattccctcttttcccagagcaaattgatgaggatgctctattacacgctcaaacgatggcatttgtcgttcttagtttttctcagctcgttcattcatttaacttgcgttcaagaacgaaatcaattttttccattgggatctttacaaataaatatttagtcttctcccttcttatcggtgttcttatgcaagtttgtatcatctccatcccgccccttgcaaatatattcggtgtacatgcattaacgatgcgagattggggatttgttctcttattaagtatcattccacttattgtgaatgagattattaaattagtgaagagaaactaaaaggcaatgaggaatagtcctcattgccttttcatttaccctactattttccgtgcagtaaaactcccacctcaaaattcagtttgagcaaagaagttaggtggtagattaactgcccataaatgtccaattgtgaaggctaataatcggtggggatgaacaaaaccccactgattaaagtttcactttatccttgtaattcttttttgatattctctgttaatgtagccatacgtttgcggctttcttcacgctcacgtttgttttgttcttcaatttgttgtgtttcttgcatacctcttgaaataatgttccaagtttcctcaagtgtttccatcttaatactagaagaacctgataatctcgctacttctacactttgcgttgcgatattttgtgcatttttcttaagtaattcatttgtacggcgatccagttcagccatagaatctgcaacaagcttttgacgcttcgcatttaccgcttgaatgataccatttttaaaaataggaatcgttgtaataaatgctgtattaattttaccaattaatttattattaccacgttgaatcatacgaatttgtggtgctgtaagtagcgcaaccatacgcgctttttctaaatcatcaatacgttgctctaaaatttcaaccgagtttttaagcgactctaattcaatacctgctaattgatcattattacgcacacgctcttcatacatcggaactaactctgtatttaaacgctctaataacatttctcctgctactacgtacttctctaagtctaaataatattttaagttttgctcatacaagccatctaacgtaccaattgattttttcatctcatcttggtacttcgtaatttccacatacactttatcaatttcacggcccatcgtttgatacttgctaaagatttgttcaatcattttatccgcttttttgaacatacgtgagaagaaaccacttttctcttccgcaaagtctttgctatcaaatctgtccataattttaccaagctgttttaataattcaccagaatcttctatctttgataatgacattgtatgtaaaatttgatcagcaaaacgtgaaatttccatagaaggttcttttccaagttcaattaattctaattgatctttaatatctactgcattataaatacgttgtacatccgcatcttgtctaagttgcaagcgaatatcttgtgctgtttgctcatttaattctgttttcggatctagtacgactgggttattcatatggtattctccctttccttataaaaatggacgaaatagtccttttattgtttgtgataaatttttataggctgatgaaccatgaaactcaagatcgaaattaacctcttcaagccaatgggaatcaaatgcccccgcttcaatatacggttcaatatcgtttcttcccgttggattgaaatggaatacatctactccaatttgatttaaaaatagtaataaaacagcatcagaacgagttaactctccactcttctcattattaaatataacaattttcggcacatcttgtgaataatcaaatttctcaagctgttctaaaatattcggtggtatttgagaaagttgcgcgaaaacatatagcgctacatcttgttttgtctctttcgcaattggtttgcacatttcactttcacacgtatggataatcgcttctgcaatcccatgttgtaaaccttccggtaaacgcttatgcggccaccaatggctattcataattagatcaggatgtaatttccccccacggtctaatgcatctcgataatgatattggaagtttgctttttgctctttcgtaaatgggaatgtattaactagtatactgttatcaaatgatgtaacagcctttaatcgttgaaaatactctttatcattctttgaaacgcctgatattttcgcaaataaagaagggatataaatatgtttattttcaacaaagaatgtcgggcgtacaaacgccttttctttcgtaattaaaaagagctcatcatatgttgtttttagtgtacgagctacaggcgtataggaacggaattgccacggcttgtacagcagtgaattatcgtggtgaagtacttgctcaatttcttttgaagcttgatacgctactgttgccacacgctcgcggcggcgatctggaaatggttcaagagaaatacggcctggatgagacacaataaaggtccttccctcttcatcaacattctcaaatccatcttttccttctgggtgataataaagcacatcacaaccgagcataataagaaagtataagaaatatatacggctttcctgtgcatcaccataccaaacgatacgcggcatctgtttcttataattaatcgtagtaaaccacttcgctacataattttcgcttagtttaattatgtcgattaagaaacgacggaagccttctgtctttaacgactgattatgttgtttctcatataatttcaatagtgaaataaacgtcgtatgtatgtaatgctgtaaatcaggattgtctactttcggtaaaagttgtttcccagataagtgtgcaactaacctatttactgtcagaccatttggtgcttcttgatgtaatccgaacacttcttgaatatgacgaagcttttccgaatcaatcactttgtttaaattttgttcgtgtaaaacttcgattcctttcgcttcactataatcaaacagttcattaaaatattcatctacatcattaggaacgccaaggattcgacatgctatataactaaatttcatctcattctctgtcagttcatattgtggacgtttttctaaaagcgtttcaaattgctttaaatctgattcatcttttaatgcatatggttgaagtgtaaaacgtgaaaacacaacagttcacctccaaaaacagttacgttttttctaagtccttcttctattataaactattttttgttataaaaaatgggcgctcgcaaaacgagcaaacccatttcaattatttattatcttctttagtagctgcaacttcttctttagcttgtccagaattcttcatgtagtgaattataaatgttgctccaaatgctacaactaaaataataaagaatagtgtatgactaatctcaatctcgattaaagacagtaacattttcgatgcaataattaagattaaaatgtatgctgtcgtttcaagctctggaatacgctctaataatttcaagaatacaccggcaataccacgcatcattaaaatacctagcattccgcctaataataaaatccaaacttcattagatacaccaaatgcagcaagtacactatctacagagaatgcgatatccattaattcgaccattgcaactgttccccagaagacaccgaacattctgaagaaaatactgttttggttcataccatgagcttcctcttcttcacctgcacctttacgcttatcaataaagtattttactgataaccaagcaaggtaaagtgcaccaagaagttttacccaccataatttaattaagaacattccgattccaattgcaataaagcggaatatataagctccaataagtccatagaataatgcttttttacgtttctcttcaggaaggtgttttaccattaccgctaacacaagtgcgttatcagcagataacaacccttcaagtacaacaagtgtaccaattaatccccaagatactggatcttgcaacactttaatccacatgtccaagtcgaaaaactgagcatacgtatcaaggattccttgcaaaatactcatcttacctttatcccctattctttgctagatttatagaaaggtcaaaaaaaggaaacgaatatcgtttcctttctatgcatccaagccatacgctcttacaagcgcacctaaaccaccttggaatccacttcctactgcattaaacttccactgtccattatgacggtataattcacaaaagacaactgctgtttcgatagagaagtcttcccctaaatcaaaacgaagaacttcttcgttcgtctcttcattcgctaaacgaacgaatgcgtttcctacttgtccaaagttttgattacggccttccgcatcataaattgtaactgtaatagcaattttatgaacgtctgctggaacctttttcaaatctacaacaagttgctcatcgtcgccttcgccttcacctgttctgttatcgccagtatgtaaaactgatccacaaggagactttaaattattatagaagataaaatcagtttccttcgtacatttcccgttcgcatctaataaaaaagcagatgcatctaaatcgaaatcgtctccgccatcataagatttaatatcccatccaagaccaattactgcttttgttaaaccaggactcgtcttacctaaatcaatcttctgtcctttttgtaactgaatagccatttatattcacctctatatttttatctttaaaaatatacccatcagtaaacatgcatttcaccaatggatatataaattaaatctattactctacatctaaaccaaagttattacatagagacgctaacccaccttggaatccacttccgattgcattgaacttccaatcacctgcatggcggtataattcacctactactaccgctgtttcaatagagaaatcttctcctaaatcgtaacgaattaactctgcattcttttcttcatcgagaatacgtacgaatgagttagaaacttgaccaaagttttggctgcggccttctccatcataaattgtaattgtgaaacaaatacgttcgatgtgagcaggaacattttttaaatcgattttaatcgcttcatcatcgccttcgccttcaccagttcggttatctcctaaatgctctacagcaccattcgcacctttgggattattatagaaaacgaaatcttctgctcctgaaactttaccgttcgcacctactaaaaagatactaacatctaaatcgaaatcagcttgtccatcataacgatttgtatcccagccaagccctacaagtacctttgataaacctggatttgtttttgttaaatctaccttttgtcccttttttaaagaaatagatgccatttaaaaattcctccttagtttatcctattgataacgtgatacaatctcacttaagtttttatcttgcgtgccttctccaactgctgaaaacttccactcattttcgtagcgatacatttctcctgcaattaaagttgttttactagcatagttttctgataaattataacgtgctaattcctcacctgtatgaggattttgaatacgaatataagcgttacgaatcataccaaagtcttgacgtctgtttacacagtcataaatatttacaacgaatactaaacggttaatacgacttgggactttatgtaattctacaaagattgtttcatcgtcaccttcgccttcacctgttaaattatctcctgaatgaataatactaccacaagtagaaagtttgtttccgaagtaaactaaatcatttttgtttaaaaaacgatctccttctaacataacaacagatgcatcacaatctatatttggtttacttccaaataatgaagacagaaatccacctgattgcccaattggatcccagcctaagccaacctgtagttttgctacttttggttgtcctttcgttaaatcgatcttttgacctttttctaaaataataggcatgaagtttctccctttctacaaagcattttccatatcggaaaatattgtattcttctcttatattgtagcattatttacctattgataaaaaggataaattctcagttatatgaaaacattcatataatttacttatgatgatgtaataagtggtaaatagcaccaatcattcctgcacaattaccgttttgtgcaagttcaatctcacaattattataaatctcttgatttaagtatttactgacctcttcttttacttcttttaaaaactcatttcctctatcggtaattcctcccccaataataattgtttctggattaaaaatataagcaagattactaattccgattgccaaatgtttaaagaaaatcccaactgcttgagcaacttctctatctcctttatcatacaactcaaaaattgttctcccattccactcgcctttgcctttatattttcttacaagccgaattaatcctgaaatcgaagcaacctcttcaaacgtttttccttctattagcatattcccccattcaccagcactaaatgaatgtcctcggtacaattctccatctataaaaattgctcccccaactcctgttccaatggtgagcataataaagttctctttctctcttacactaccattccacttttctccaaacgctgcacaattcacatcattgtcaatcgatactggaacttttaatatctcttgcaatctatcaataataggaatagtactatatcccggaatatgatccgcgcctcccgtcacaattcccgcagtgctaataccaattccggcaatagtatgttcattcattaatttttttgataaaagaatgagtttttgaataatttgttctccgcctaagtgaatttctgttgcaactgttttacgctttaatactctccctgcttctgaaataatgccatacttaatttgcgtaccgccaatatcaaacgctatatactttttcatctactgccacttcctctaccgttatgaatgtaaattctccacctctattatttgtaggaaatctacattaactcttttctgctttgacaaatataccacctttttctatatatagttttttttgcataaaactctttttcctaagaaatattacaaagggatgtattttagatggaacattcatttcttaggaggaaaaccatgacgaaaatcttcattttagcatcaacactctctctatctttttttagcggtttaaatatcggtaatgctgcaactgaaaacttccaaccattaacaaacgctattgtacaaaatagcgatcattttgcagaaggaaactcaaaggataataataaacctccaggaaataacggttctcaggacgatagtggttccggtggcagcggctctggtgaaaacggttctggtgaaaacggttctggtggctttggcggcaacagttccggcggtaacggttctgatggcagtggccctggcggcaatggttccgacgataacggttctggtggcaacggttctagcggcagtgattctggcggttctggcggcaacggttccggcggtaatggttccggtggcagtggccctggcggcaatggttccggcgataacggttctggtggtaaccgttctggtagcaacggctctggtggcagcggttctggcggtaacggttctggtggtaaccgttctggtggcgatggttctggtggcagtggctcacacggcggtaatggctctcaaggtggcaatcgtgttaaaggcgatagcaattctcaggagggcaacggttctcaagggggtaatgtaaaagataatacgaaaaaacaaggtgataaattaccgaataccgcaacgcattaccctatatctattttaatgggtctttcaatattcctaattggtatgttactgtttattcgtcgtaaaaacgtaaaataagagcaacatacttccatctaaagaatacatgaaatactttataaaactaaaaaggactttggattgcattttattatgcagcccaaagtcctttttatcacctatcagaaaaagtattaatacgcttttccccaatacaccatttgtttagcttctttaccacaacaaatgcattcttcagctaaatgctcttgctcaaaaggcatacaacgtgaagatactccaacttcttcttttagtttttcttcacaagctaattccccgcaccacattgccttaataaagccttgcttttcgtcagctatttttttcatctcttcgaaatttgtcgcaacatacgtattctcatcgcgaaatgcttttgctttatcaaataaagcaatatgaatttcttcaagtaatgctggaatacgttcttctaattgatccattggtacaaactctttttccttcgtgtctcttcttacaagtacaacttgattcttttcaatatctttagggccaacttctaatcgaattggaatccccttcatttcatactcattaaatttccagcctggtgttttattactagcatctatttttactcgtgcaaccttttgaatatgttcttgtaactctattgcttttgctaaaactccttctttatgctgagcaatcggtacaataacaacttgcactggagcgacttttggtggcattacaagtccattattatcactatgaaccattattagcccgcctatcattcttgttgatacaccccaagatgtttggtgcacatattgccacttaccgttacgatctaaaaacttaatatcaaatgcttctgagaaattcgtgccaaagttatgagaggttcctgtttgaagtgcttttccatcatgcattaaactttcaattgtataagttgcctttgctccagcaaacttctctttttctgttttttgtcctttaataactggtattgctaaataatcctcacagaaagaagcatataagtttaaaatatttaatgtttcagcctgcgattcttctgccgtttcatggattgtatgaccctcttgccataaaaattcagtcgtacgaaggaacggcctagttgtcttctcccaacgaactactgaacaccactgattatataactttggcaaatcattataggattgcacaatttttgaaaagtgctcacagaataaagtttcagatgtaggacgtacacaaagtctttccgctaacttttcatctccaccatgcgtaacccatgctacttcaggagcaaatccttcaacatgatccttctctttttgcaataaactctctgggataaacattggcatatatacattttcatggccagttccttttaacttctcatccatcaccttctgcatattctcccataaggcatagccatacggacgtaaaatcatgcacccttttacacttgaataatcaacaagttcggctttttttacaatatcggtataccactgcgcaaagtcctcttccatcttcgtaatggcttgcacttgttcttttgccatagtcagtcttcctccttctagaaaatacaaaaaagcccgcgtccctaaatagggaccgagctttgccggcgttaccaccctgattcatgcacaaaaattgcgcatgctctctttttgataacgggaaattcccgctgcatatgcagaactcaaaggcaggttccatattgcctttttaagaatctttcagcctgacggattctctctctgctaaaaaggttgaacatgtactagtcctttttcatcgttataacgaaataaatttgttgattatcataatacaaattcttttttaaaacaatagctaattttcttatttttatatatccttttcattttttgtagttttatacgtagcttttccgcgtaattttcacaagttgatgtgcaatcataccgataagtgtaccaattaggacgaagaaaccaataaatccatatcccattccttcccacccaccaataaccatcattgtaacgggaaaggacgctaagcaaagaagtattaaactaagtgcaaatataatatcaaactgtttgtctggaaaccgtttctttagtaaatatgaaatagtaaatacaaggataatcgtgattccgccaatgatgtaaaaaataccaaatccatctaaccaatccatagtgttccctccctccatagattcccttatacttaattatatgtttaatttttctgaaaataaataataaactttcacctaaatatatgtatttattactaggtgttaatagtaatatataataataggttttatataatcaggagggaactttatggataaagcattaacaaaccacgtcatcattttatcattcgactgtttatcagctttagattttcctatactacaaaaactacctcatttccaatctctaataaaaaagggcacggttgtcgaaaaagtagaaccaatttatccttctgtaacatatccaagccactcaacaatcgtaactggtaattaccctaacaagcacggtgttgttagcaatacgttacttcaaccagggcgtgaatcacctgattggcattggtaccgaaaatcaataaaaggaacaacattgtatgatgaagcgcgcaaagcaaatttaacgacagctgcccttctatggcctgttactggaagagcgaacatcgattacaatttaccagaaattttccccaatagaccttggcaaaatcaagtgttagtttccttatttagcggtagcccactataccaattagatttaaatcgtcgtttcggccatataagaaatggtttatcacaaccagagctggatgatttcgtcctcgcctctgctgtgcatacaatccagacgaaaaagcctaatgtcatgttcgtacatttcaccgatctagacacacaaagacactatcacggctttgaatctaacgaaacaacagctgctatccagagacacgacgaacgtctagggaaaattattcaagcactaaaagaaagtgacctatacgaagaaagtacaattattgcccttggtgatcatagcgctttaagtgaaaacaaatccatccaattaaatgtgctattccatgaaagaggacttatatctcttaataaaaaaggaaaattagtagactggaaagcctattgccaaagttgcgacggctctgcctatgtatatgtaagggacaaaaatgatacggatacaatccgggaggtacaactactccttgaagaactacttcaaaataaacaaaacggaattgaatttatacttcatgatgaagctgccaaagactgcggtgcagacgttaattgtttattcatgttagaagcacgagaagggtattatttcactgaaaactatacaggagattttataaaagaaattactgaaaaagatgttacgcctagtaaaaaatatacatttggtacgcatggatactctccaacaaaacctaactatgaaacaatttttatcgctgctgggaaaggaataaaaagtggctttaccgtcccgtatatgagacttattgatgaaggtccaactatcgctagactactcggtttacacttaggtgaaacagacggagcaattgtagaggatttactccaattgtaaagaactgtgtatatatgtaaaagttatgtaaaattcatcactgtttctctttttataatttttatttttgtacactgttagtaaaacaaatttaagggggaacattatatgaaaaaaatgtccagacaagaaaaaagctggatattatacgattgggcgaactctgtatactcgctcgtcattacaactgcattatttccaatttactttaaagcagctgcaaaagaagctggactatctggggcaacttcaacagcatattggggatatgcaaactcattcgcaacacttttaatttctatacttgctcctattcttggcacagttgctgattataaaggatttaaaaaacgttttttcacattcttctttggactcggtatcgtatttacaagtatgttagcagtcgttccaacctctcagtggtacttattgctagggtgctatatgctcgccttaatcggctttgctggagcaaacattttctatgatgcatttttagtagacgtcacttctgaagatagaatggaccgaatttctacaagaggatttgcattaggttatatcgggagtacaattccttttatcggttgtatcgctcttattattctttctcaaaaaggaactattcccttatcggtcggcattgctagtcaaatttcctttgcaataacagctctttggtgggggttatttacaattccaatgctaaaaaacgtagagcaaacacactatattgagcgtcatccaagacctattagaatgagcttcaaacgtcttgctgatacttttaaaaatattaaagaatataaaactgtatttatgtttctaatcgcttactttttctatattgacggagtcgatacaattattactatgtctaccgcttacggaaccgatctcggtattagtgcaacgaatctattaatcatattatttgtaacacaaattgtcgcttgtccatttgctttactatacggaaaattatctgaaacatttactggcaaaaaaatgctatatgtcggtatcattatttatatcattatttgcacatatgcttattttttaaaaacgacacttgatttttggattttagcaatgttagttgctacatctcaaggtggtattcaagcactaagtcgttcatactttgcaaaactagtaccaaaagaatctgctaatgaattcttcggattttataatatatttgggaagtttgccgcaattatgggtccggtattagtcggtgttacaacgcaattaacaggaaaaacaaacgctggtgttcttagtattattgttctatttattatcggaggattcttactaactagagttccagaaaataatacatccgttacaccacctagtccaaagactaaaacgctataagaaaagatcctcttctcataagaagaggatcttttttatttttaaaggtgcgccttataatgaacgactctactgcttgtacaaaaataatttatcaacagttgttcctaatacttcagctaaacggaacgctaacgctaagcttggatcatatttattattctcaattgcatttatcgtttgtctagaaaccttacatttatcagctaatgcgccttgtgaaatattattttcagtgcgtaattcatagatttgatttttcacaccattgctcctaacctgtaaaatcgtttttacaacatcagtatataattggctcatatagttgtcaaaagttcctcaaagaaaaaaggagcaatattgctcccttacaatagttattttgaagctaatgaatttgttagtgcctctttgttagcgatatcttctttctttatttgcatacgtacaactggccctatcgctaataaaataagtgccatcgctatacaaaacacagtaactagtgaagttagttcctttaatcctccagctaatgaagttccaattagcattgcccccataaacagtggtaaaatcgttccatttactcttccaaccatattttctggtacaagttgaatcataagcgtaccgacaacaatattaacacaagctaaacaaatacctgttccaaatctcatgaaactagtaatccaaaatgatgtagatagcccttctactaaaaatgaaagggctaatatacccataccgaatacaaacatctttttcggattcacttttgaagcgaaaactgcagcaacaataccaccgagtaacatacctattccgtcagctgccgctaaatattgaacagcttctttttccatacctaaacgttcaattacaagaaatacttctaatggattcgttaatccaacagctaaacccataattgtaaaagtgatcgtaatcatacgtaaatttttcgtatgaagaacatacttccaaccttcttttatatcattttttaatgagtctctcgccacctgctctttttcaacccattttggtaagaatgaaagggcgatagcagataacaaaaataaaatgattaagctatatagtgatgtaaataaaccaagttgtgtatacacaagcgatcctaccactggtccaaaaatcagaaataatgactgtaatgtttggttaaatgcaatcgcatttgctacctctccttcttttacatagcgcttaaatatacgcgaagatgagggctgagaaaactgacctacaatcgcggaaatgagtgttgcaaaaaatatagcctgccaataatccagctttaacaacaagacaattcctataatagacagtacacttaatacatctccagcgaccattgttcttttcggattccagcgatcagctagcgcaccaccgataaacgagaaaataaaaataggtgcatattccataactgataacaacgaaacagaaactggatcattattcgttcgctccattataaaatacaaaagagccatatttctgatccaaattgcaaattgttgtaaaatatcagacgccataacgagcataaatgctcggtttttaaataaagcgttcattttcattcccctttcataaaccgaccgttcggtctaatttattttgtaagaaaagcaactgacctattattcagctgccattccttttaacaatacatctattgcctttttataaatacgtttcagctctttataatctaattcgtagtaaagcactccaagtcctgataataatccgtttacaatatacataagatcacgagtattatcttcacggaactctccagactgtatacctacttcaattaatttctcaaacataacatatgattctctagttaaagctaacagttcatccagaatctctttacttacaacttggctcatagagaattcctctattgcatttgaaattggttgctgtatgtcctctacatgatattccgcgagaccatatagtttttcagtactagtgctatacaacttctctttttcattccatttttcaatccaatcatacgtatgctgtttcactacaaataaaaataattcttctttacttttaaagtgataataaatacttcctttacttcgctctgtaatttcacaaatctcttccatagatgtagctgcgtagcccttctgtgaaaatagactttctgctttatatgcaatttctttctttatctcttctgcgcttcttctcatattcacacctctttaaaccgaccgttcagtctaataataacaaatcaaaaacctctatcgcaagaggctatattccttatttaagaaaacgtactttcaaaccaagttcgaatcatatgtatggttccaaatttaaatgctaatttaacaagaaatacgcctcccgcagctaataaaaataacactactttccccttatttttcactttcggttcccttttcatttccattccccttagtatgttaaaaatattaaacaaacgtttgtttaactgtgtttatgcatatgtaagccgactaatcaaacgtttgtttaactgtgtttatgcatatgtaagccgactaatcaaacgtttgtttaaaaagaaatacgcctatataaggcgcatttttatcaatcaccaccgccaccacagcttcctccgctatctcccccaaaagatcctccacaatcatgtgagccgccatcatgcgagctatcattatcagatccagcaaagaaaaataatggtgatgagctgttagatgaattatgaatgttattttgttttgtaagatttaccttctttttgttcgatcgaactgctgttacgattgttccaactacaacaaataatagtatgacaataataaattccatttaaaagcctcccttattcctcgaataattgaatggttctctctagattttcaagtgaaatgaagcgtgattcacgaagaatttcttttccattatgaaataataaaattgttggccctgtaaatactccatatcgccccgcaatctcctgcatgtcttgtagtaatatctctattttctctacgtaatcataattctctaatacgcaatttacttttcttagcataacatcacaaacaccacaattttccgttttaataaacagaagtaccaattgttgttcttcgatataggtcgctaattcttctatcgttttaaatgtagtcatcttatccctcttagcgtaatttacgaaatactttgtcttgatacatacgaaaagctgaactatctttaatctttctcttttccattacctgctgaaaacgaagcgtttttgctgttaactcttcttgtaattcttttctctctgcttcatcataacagcaagcaattagatcctctatttttaatatatctttttgtagttccatttctggtagaatcattcccgcattttttaaaattttataactcattctaagttctggaggtaccattgaaagatcttctaattgtagtggttttccttttcccggaagataatcaagatcaccattccgtattgcttgtcgaattttttcttcagcaatgttcaaaaacacatccacactattccctcctttacatatttttactattattttacatgatatttccttatctttctacgtctttaataattggctccatacaattttttctcaaatttatttataatgagctatttcctcccataccaatctttcgttttcatatatagtttgtattcaagcctttttgtattgagaaagtctttttcaacttaataaagcgtttacactaaatcttacatttgttacgatttaatcacccccagctcccttgtatagacttcgtgatgtctgatcattttatctagacgtttcacacgtctagattcattttgatttattggcgtatgcctttaaatatatcttttattttgaaaggagaaatggctatgaggtctcaaaaattcacactgctattactatccctactacttttcttacctctttttctcacaaattttattactccaaatctcgcattagcagattcaccaaagcaaagtcaaaaaattgttgggtactttccttcgtggggcgtttacggacgtaattatcaagttgctgacattgatgcatcaaaacttactcaccttaactatgctttcgcggatatttgttggaatggaaaacatggaaacccttctactcatcctgataatccaaataaacaaacgtggaactgtaaagaatctggtgtaccattgcaaaataaagaggttcctaatggtactctcgtactcggggaaccatgggctgatgttaccaaatcgtatcctggctcagggacaacttgggaagattgcgataaatatgcccgttgcggaaatttcggggaactaaaacgattaaaagctaaatatcctcacttaaaaacaattatttccgttggtggctggacttggtctaaccgcttttctgatatggccgctgatgaaaaaacaagaaaagtatttgctgaatctacagtagcttttcttcgcgcatatgggtttgatggcgtagatttagactgggaatatccgggcgttgaaacgattcctggtggtagttatcgtcctgaagataaacaaaatttcactctccttcttcaagacgtccgaaatgctttgaataaagcaggtgctgaagatggcaaacaatatttactaacaatcgcttcaggtgcaagccaacgctacgctgatcatacagaactaaagaaaatttctcaaatactcgattggattaatattatgacatatgatttccacggcggatgggaagctacttctaatcataatgcagctctatataaggatccaaatgatccagcagcaaatacgaatttttacgtagatggtgctataaatgtttatacaaatgaaggtgttccagtcgataaactagtattaggcgtacccttttacggacgtggctggaaaagttgtggcaaagaaaataacggacaatatcaaccttgcaaaccaggtagtgatgggaaacttgcttctaaaggtacttgggatgattactctaccggtgacacaggtgtctatgattacggtgatttagcagccaattacgttaataaaaatggttttgtacgctactggaatgacacagctaaagtaccttacttatataatgcaactacaggcacatttattagctacgatgacaatgaatctatgaaatacaaaacagactatataaagacgaaaggtttaagtggagcaatgttttgggaactaagcggagattgccgtacaagtccaaaatatagttgcagtggtccaaaattacttgatacgctagtaaaagaattacttggtggacctattaatcaaaaagatactgagccaccaacgaatgttaaaaacattgtagttacgaataaaaattcaaactcagttcaattaaactggactgcatctactgataacgtaggagttacggaatatgaaattactgctggagaagagaaatggagtacaacaacaaatagcattacaattaaaaacttaaaacctaatacggaatacaaattttcaataattgccaaagatgctgctggaaataaatcacaacctaccgctcttactgtcaaaacggatgaagctaatacgacacctcctgatggaaatggtactgctacattttcagtcacttcgaattggggcagcggttataacttctcgattataatcaaaaataatggaacgaaccctattaaaaattggaaattagaatttgattatagcggcaatttaacacaagtttgggattctaaaattagtagtaaaacaaataatcattatgtaattacgaacgcaggatggaatggtgaaattcctcctggtggatctattacaattggcggtgcaggaacaggtaatcctgccgaacttttaaatgccgtcattagcgaaaactagacgtaatatccattaattacttcactgaagtttgaatttaggtttgagcaatacctcctaaattcaaacttttaattttatgaaaaatcaaaaacatctcaataacttgttataattatatttagtttctaatatgaagtttatatgaagttcatttgaattttacatggatttcctttaatttctattgtcttcctataatatccatattatcctttacataaaggaattattttcattccattttgaactatctatatatataaagaaagatagtcacctgttagggaaaggctttcgtattattataaatataacaaaagaaaaagcacgcttataagcgcaccataagagtgcttcttcatacaattctcatgtaagagttctcgaaaatcatgttaatcacaaagaaaaggcattagctcataaaagctaatgccttttctttattcatattgttcagcattccaatcttctatattccatacttttgttatccacgattcatagaaagaaggctcatgtgagacaattaaaaccgttcctttgtattgttgtaatgcttcctataaagccatcttagtttctacatccaaatgattagtccgttcgtctaaaattaaaacatcagctttttctattttttcatataaggagctaacacacttaaaatctcttctttatccttttttaattcgagtgatgttaacatatccatcgttctcggcctaggtaatttcacttgtacctcgccaactattgaagctggtctttgagataaaataaatacgcgatctgaaagcaagattgcctcatctaggtcatgtgtaaccataacgattgtttgcttctcttgatgccaagagtttaaaagccagctatgtacttccatttttgtaaatgcatctaatttaccaaaaggctcatcaagtagcataattggcttttcacataaatatgtgcgcagaaaactaattctttgacgcataccaccagacaattcatctggataatggtctgcatattcatctagttcgaactgctttaatgcttccattccctctgttagcctttgttttttcggtttcccttcgatttccaatggaagaacgatattttgcaaagctgatcgccacggtagcaataaatcttgttgtggcatataactaacaacatcttgttcttgtacttgcttatcgttatacgttacgttcccgtttgttggtttttcaacatttgcaatcatgtttaataatgtgcttttcccgcaaccactcggtcctacaaaggaaacaaactctccctcttgtatagaggcactaatattctctaatacattttttccgtcgaaagatttcactatattttttatttgtaatccgctcatttttcacttggaaggaattcatttgtaaaagcatcttttacatcgattttcttcttaataactttgttgtcatataagaaattcatgtaattcgtccaaatttcttccttctgtactccccatgctttagcatcatcttgatacttcgtacttaaccatttttggctttcttgaactaaatctttattcacatctggaacagctttaattaaaatatcagcagcctctttcggttccttaattgcaaaattataaccttctgtcgttgcactcataaactttttcacaaagtctttatcttgcttcgtatgtttttcactcgtaataataacaggactatagaaatcaagcgctggatctaagtccttcaccataatcgtatttaactcttttccttgacgcttcgcttcaataccatcccaaccgtaataaatccattcgaaatctgcatcacggccaattgatttaaagaaatctgtttgtcctaagatgattttttcaactttattaaaatcagcttgatgtttatccataatcgtctttaatgtcgcttcttctgctggtcctccccagccgccgtaacgtttaccttcaaaatctttcggtgacgtcatattgtctttcttaagcgatgcaaacgctgaagtgttatgctgaataatcgctcctacagatacaacaggaattccttctacacgagctaacgttacattttcttgtgcgcttattgcgaagtctgcttttcctgatgctatcatttgctctgctgttacattgtcacctggttgaataatttctacatctaatccttgctttttgtaataatctttcgttttcgctacatacaagccagtatgattcgtatttggaaaccaatctaatactacttttactttttgatctttacttgcactttcttctttcttcgccggattacatccagccacacctaccgctactaaggcagctaacataactttcaaaccttttttcattttctgccgtcctttctatatatccatggtgctgttattcttgccataaactctacgataaaatacaggcataatgtcaccataacgatgattgctgcaacaccaaatactcgggcagtcaaaaaggattttgtagccctcgtaagcataacgcctaatccttcacttgcaccgagccattctccgataattgctcccattacgctatatgtaactgcaatttttaaacctgagaaaaagtatgggagcactgctggaaattttactttctggtaaacttgccatttcgtcgccttcattgtttgtaacagtttcagcatatttttatctactgtttgaaaaccttctaaaatactaagcgcaattgggaagaaacaaacgagtattacgaccattactttcggcaacatcccatatccaaaccaaataataaatagcggtgcaagtacaacaattggaattgtttgcgaaataacgagcaatggatttattaaaatacgaaataacggtataacgtccataataattgcgatactcgtccccaataaaattgcaaagaatagtccaattataacttcctgcagtgtttgcatcgtatttggtaatagtaaatctttcatcccaattaattcttgaacattggcagaaggctttggtaaaatccacggttcgattttaaataatgaaacagatccttcccatatcgcaatgagaaggataagccaaatagttgtaataagtttagattgcttctggttttgcatattcatcacggtacttccaaaccttttcatctatcgttacaccagtgcttggacgataatggattttaatagaagtaatcacttcttctgctccagcatcgacgcaagcttgttgcgcacgtttaacgacatcaagaagtacatctaattctccttccaaagttgtttccattgcccctacttcataacgaactcccgattgttgcacaacttcaattgctttatcgacaacagaatatacatctttcgttttcgcttgtggtactactgaaaatgacattgtaacttgttgtgacataataaaatcccccttataaaattaaatttcaaaaataagaaaaggctttcctactgcgtaggaaagccttgtatgcaagttattacagaataacatatgctacatcactttaagtaactccctacgctggcattatccagatcaggttgagggtcgatgtttacttacatcctctcagccaattggctccccggtccttaattcgttttcattgtagcatgatttattttattgaacaaacaaaagcatgcataatcatttcattatttttggaaaataaccaactttttcaccatgagctaataactgctgtataaattctttattaattgctggtactatcaattcttttttcttaatccattcattcgttctacgcgtacccattacaatttcagattgctgtgctccatctcctgcaacttgagaagcaattaactctgctattacttcatttcccttcgctaatgcaagtccggtatttacatattctgaaagtggaaccatttcaagattgtatccacactctccaattagctgtataaattgttcaaactcaatttgatgtggatgacaaatatgtaacgtctctcctacaatttgcgcatcttgtaaatacgatacaattgatttactagcaaaatcaattggtgtgaaatcaactttccacttcacatttggtgctttcccaattaatagcattgttttaataagacgataaaatgcgtttccttcaatattttgttggaacgaacctgtttctgaatgacatgctaaattacctgcacgataaatatttccgcgcaaaccatttttcattgcttcacgaacaatgttttccgcttgtagtttactatttgaatatacattctctaagtctacactgtaattaaaatcaccagttttcatgtatgtatcccattgatctaccgctaattctaacgggataccaattgtagaaataaaatggaatgtagcacctttctccgctaatgctagcatacggctagttccttggacatttatattttcaaattgttttacatctccaaaatgtcttacatctgcaccgcaatgaattatcgtatccatcttagaactgatgaacataaattcttcttcgctcatcccaagatactcttctcccagatcaccagctacggcctgtatacgctgtaaccattcttcacatatatcattaaagtagcctgttaatgtatctataattctttgctgcacatctttggttggtcttactaaacaataaatagtagcagatgtatctctcaacaattcatataatatgtgtgatcctaaataaccagtagctcctgttaaaaagacatttgaaatctggatttcttccaaaacgtttgcatacgtgatagtatctggctcgtgaatcactttatattcacgaaatacttcttctttctctacttttacttctcgctcaattcgagctaatccatatatcgttctttctttaaagaaatcttgaattgttaaatgtgagaaatcttcttttaacaatgttaagactcgtaatacttttaatgaatgtccaccaattgtaaagaaatcatcatgcactccaacttttgaaattcctaatacttccgcccaggcgttcgcgatttgtttttctgctttattagaaggtgcaacatattcttgtagccgaaccggttcatacttttcttctaactgagctaacttcttaacatcaatctttttattaggtgtaagtggtaattcattaatataaattagtttagatggcaccatataatctggtaattgctcttgtaactgataaactaattctggtatttcttttttatttaaagttgtatagaacgcgattaaatattggctaccttccttactcttcttagcaaaaacagcattttcttttatattatgattttgagaaattttactttggatttctcctagttcaatacgatgtcctctaatttttacttgatcatctttccgatgtaaaaactctatatttccatcctctagcaacttaacgatatcacctgttttatatatattaactataggattaaaagggttcggaataaaagcttcaattgttttattaggcttattaaaatacccttttgctaatcccactgaatctatatataattcaccaggtacaccaattggacaaagattcatattctcatccaaaatcataacttgataattagcacatggtttaccaatgggaatactcgcaacatcctcatttaactgactaggtattttataggttgtcgtcactacagtacattctgtcggtccgtatacattataaatttcaacatttgtacctattctttctctccacaatttaataacctctacaggcaacatttcaccaccaatcgcaattctttttagggaagctagcttatatatatcttcttctgctaaataagttgctacttgtcgaacaaaaattgttgctaatgccaagattgaagttgctttcactttatagattgcatttgcaaatgcctctacagacaatcgctcttcctctaatagtacatacaagtttcctccgcagaataaagaagcaaatgactcccatacagaagcatcgaaactaaaggaaggaaattgagcaaatacatcctcttctgtcaattcatattgctttttcatccaagtgtacagattaacaacgcctctatgtgctaacatcgttccctttggattccctgttgaacccgatgtataaatcatataagctacatcatcacaatgaatagacaactttacatctatatcttcataagtttcactatcatacaatgaaactgtttgaaccccatcacatgttataggcgtctctttcatcaatataactttcgcttggctatcttgaataatgtactgtattctactttccggataatctggatcaatcggaacatacgctgcaccagcttttaatatagctaccatacttactactgtgtctatgctacgtttcataaatattccaacatagtctcctaattggacgccgtttttaattaacatatgagctatttgattactttttttatttagctcctcataagttaaagtaccttcccttgaagataaagctatacgatttggaaattgagtaacagtattatagaacatatcgacgatacttttctcaggatatactgctgtcgtatcattcacttgactataaagtgccatctcggcctctgtaataatattaaaatgttttatatacttattagtattttgtgatatatcaactaaaacaccttgtatttgttgtgcataacgagtaatcgttgtctctttccaattaacactattaaatattatttctacactttgcatatttttactaaatacaaattgtaatgtattcgtgtcttgtagctcataatatgtttcaccaataataataggtgacatttcatataatgtattaccgttttgaaactcttctatttcttcctcattcatttctttaatttgctccagttgctcttcaatttgtaaatttaaactttcataggagagaaaattagaaacttcaatagtaattggaaataaatttcctcttacatgataaagcatgacaatatgtttttctttagaaatatgatataaccacgttgcagtcgctcctattaaatctacaatgtgagtcaaatttgaaaacagttccgttttcctttttatcctaagttctgttccgtgcacatctttaggtattttaatacttccttctacttttcctaaaaattcttttatcatctcattataagaaatcactaatttcatatttatgtaaattcctctcttaaatataataaaggtgtgaaaattcacacctttttcatcccttattaaagggcagattcgttcaattcataatcagtagcggagataccccccttgattagaattgaactttctccttattcgcttttaaactcaccaataagctcttgcaattcctgagaaagccaacttaaagaagtcgctaattctgcaatatcttgtactgatatttcttgctctttcatgctttcttcaacattactactgctgttggcataagtatttgcaatatgtgataattcatttacgacttgaacaatattctggctattttgtaaaatgtcactcgaattaccggaaacagcttttacttgatctgtaacagattgcgctgattttgagattttttcaaagaaatctccactactttgaacaagcgaaattccagtttctacttcttttgaacctttttgcatggaaactacagcatcttctgtctcagcttgtgtttcaccaattaatttcgctatatcttttgcagacgcttccgtttgttctgctaattttcgtacttcatcagcaacaactgcaaaccctcttccagctgctccagcacgtgaagcctcaatagaagcatttaaagctaatagatttgtttgatttgaaatacctgtaattacagttacgatatcactaatttcttttgaccttgtttctaacgaataaatgatggaagataaatcttgtactgcattttggattaaactcatttgattaataatttgtccaatcacttcattaccttcaattgaatgttgttccataccttcagaagcaaccgcaacttgttttgcagccccagttatttcttctaccttatcttccattccatgtacaattcctaaacattgttgtactgaagttttttgagactgtgcccctactcttaaaccttcaatagaacttgcaatctcttgaactgccatgctgttttcctctgtactcgccgacaattcttgtgaagaagaagaaacttgctcagcagtttgccttactttatctataatccctttaaatttttcaattgtgttattgaaataaacattaataattccaatatcatctggtctttcttttaatttaatacttaagtcaccttcaccaattttacgtaacccttctcgtaaatcttttaatggagctagcgagtgacgcacgataaagaattgagtaatagtcgcaattgctaatgaaataatgatgaagagtaagccctgtatcataaacttctcttttgtaataggaacaatggaagcatctaagtcagccgcaataattgcaacaatattgttttctccatctgtaattggttctaatattgtcacccacgaacctatttcatcttcatatacttctgtcatttgagcctttttcgtatcaatcactttatcgtatgccttcatccaatgagcgggttgttcataataatctcccggctttataggaaacgcatttgttaactctgtagtcaaaccaacgagttgtaattctcgcttttcattcggctttgctcctgtaacatacgtttgtccaacgcttttcaattcttttgatacttcatctaatttctctgttaacttttcttttttcactttttcggctgtaggatctttcgccatgtctctaactaattctacatccagttttttcaatactatttctcctgtttcaatagactgcctttcaaataaagacatcatactattttgaaacatgttaaaacttaatgcacccatacttccaacaagtgtcaaaataactaatacggttaataagacgttcttttgaaggaacgataacttatgccaatattttttcattaatatccaccttccttaatcaacataaacaaaaaaaacaaaatatatgaatattttgtttgaaaatgtttctcaatatgttcgagaataaaaaaaagccaatgtaaaagcattggccaagaccaaccctatccgtccggtaactggctagcgtagcctttcgaccttagctcctgtagttttgcgtcctcatgtttccatcagtttgcctttctcgctgaacgagttgaacgatatgggagttctatgagaattaatttattctctttcaaagattacaacatataaatcaaaatgtctacttatttagagatataaatacaaatttttaatgaattgctttttcaaaataatttcaaaaagtacgtgaatgttactttttttatgttatataataaaaaatgtataaataacaaggatttcttcgggtatttatttaattttcattcaaattaaactattcgaatatatcttaactaatgaatttcggaggtagtttatcatgttttggctacaatttcttaccttgttactctgtatttttattggtgcacgcctaggcggagttggtttaggagtaatgggtggagttggtatggcaatactcgtttttgtcttccacttacaaccaacggcgcctcctatcgatgtaatgcttatgattttggcagtaattacagctgctggtgctttgcaagccgctggaggaatggactaccttgttcatctagctgaaaaggcattacgaaaaaatccaaaacgcattacattctttgctccaattgttacttatttatttacactttgtgcaggaactggtcacgttgcttattctgtacttcctgttatcgctgaagtctctcgcgaatccggaattagaccagaacgaccaatgtcaattgccgtaattgcttcccaacaagcaattacagctagtcctatatcagctgcaacagttgcacttttagcaatgttagctgactataaaatcaccttattagatattttaaaagtaagtatcccttctactttcatcgcttgtatgatagctgcatttgttgctagtaagatgggaaaagaattaaatgaagaccctgaatacttaaaacgattaaaagaaggattaattcctaagcttgaagagaaaaaagaatttgtaggtgtaaagggcgcaaaattatcagttatccttttccttgtaggaaccttccttgttgtacttcttggttcatttgaagcacttcgtccaggatggatagttgatgggaagttagcccgtctttccatgccgaacacaattgagatggttatgttaactatcgcggctcttattattattttctgtaaaccaaatgtagaaagcattgtatctggtaacgtctttaaagcaggagcaacagcagttgttgctattttcggtatcgcttggatgggagatactttctttaatggaaacttaaatatgattcaaggatcgattcagcatttagtaacaagtgcaccttggctatttgctatcgcactattcattctatctattttactgtacagccaagcagcaacagttcgtgccttaatgccacttggactatctcttggtattccaccagcgctactgattgcgatgttccctgcagtaaatggatatttcttcattccaaactatggaacaatcgttgctgccattaactttgaccgtactggtacaacaggtatcggtaaatacgtattaaatcatagttttatgattccgggcctaattgcaacatttacttctatcggcattggaatgctcttaatttcaattatgttttaaagaaaaagcacaaacctttatttaaaaaggtttgtgcttttttaatcaaatatttgtttaaattttgggcagtctatttcttcatgtagcacttaaaatactacacttccttccctacaaacttctctttacttcttcaactaattttctcgtactttcatacgcagattccgctaaactaattgctgaaataactgaaacaccgtccgcacccgcctctataactgccgctgtattttcaattgtaatcccaccaataccaacgattggcactgtaattccttgttctctaaaataagctaatcctttcgttccttgaaccgctttcgtatcttttttcgtactcgttgggaaaataggaccaacacctaaataatccgctccattttcgattgcaaaacgtgcttcttcaattgtatgagcagatacgccgataattttatctcccattttttcacgaacagatgtaattccttcatcatcttgtccaacatgaacaccatctgcatctaattcaatggctaattctacatcatcatttacaatgaaaggaacactatattccttacaaagcgtctgcaattcttttgcaaagcgcactctatcttctccgattaaagaaccttcccccttctcgcgaaactgaaaaagtgtcactccaccatctaacgcttctttcaatacagctaaaggatccctcgtgcagttattacttcccataataaaatacacttgcaatagcttagacattttatctatttcaatgcgtgccatttctttcactccctcttactctaactccacaatcttcccatacttctcaatatcacctgaagttgtattcgctaattgatttaaaaattcaatttggaaactaccaggccctttttctaccgccttagcagctgccagttccgaagctacaccataaaacgttaatgcggctactgctgctttaacataatctttttccactgctacaaatgctcctattacagaagttagtaaacaacctgttcccgtaactttcgttaaaatagggtgaccatttcgaataacaatagttctctctccatctgtaacaacatcttcttttccagtaatgaccgcaactgtatttagttcatctgctgcctgccttgcaatacttacaatattgccatttccagtaccagcgtctacccctttaatttcccatttctcattaataacatttgctatttcagctgcatttccgcggataattgctaaatcgatttcagccggaatatgtctcgcaacttctgttcgatatgaagttgctcctgcaccaactggatcaaatagtactggcacattgttcgcatttgctgatttacccgcaagtaacatcgcttctacttcttcaggacgaagtgtccccatatttaatactaacgctccagcaatgctagccatttctgctacttcttcttttgcatacgccattacaggcgatgccccaagtgccaacaaaccgttagcagtaaaatttgttacaacaacatttgtaatattatgaacgagcggattagattctctcaccaaatccactactttactaatttctttcatattcatccttttcatctcctaactataatgatgggagatacacaaaaagacactttgcgcgtacgcaaagtgcctgaacatgtgcttttacactctccctacgctggcattatccaacaggttcaaatggtcaatgacggactagtagtcatactctcagtttgtatccacaaactcccatgtgcttattattcatctacttcaaagtctactcttattctagtaaaataacaagttctttacttttctatttaatatagaagcaacctatataacaataaacataatcaagtgaaactttaatcagtgagtgttttgttcatcccactaaaaaccgatcaaatatggagcgaaactgaatctcaagaagatgtatgctatatttaacttatggaaatttgaaaggatgtttttaatatgtcaaaaagcgttgtaatcgctgaaaaaccttccgttgcacgagatattgctcgtgtactgaagtgtgataaaaaaggaaacggctatcttgagggtagtaaatatattgtaacttgggctttaggtcatctcgttacattagcagatccagaaagttatgatgtgaaatataaaaagtggaatttagaagatttaccgatgctacctgagcgtttgaaattaacggttattaaacaaactggtaaacaatttaatgctgtaaaaagtcagctacttagaaaagatgtaaatgaaattattgtagcaacagacgctggacgtgaaggggaattagtcgcacgctggattatcgataaagttaagctaaataaaccaatcaaacgtttatggatttcttctgtaaccgataaagcaattaaagatggttttgcaaatttaaaaccaggtaaagcctatgacaatttatacgcttcagcagttgcacgttcagaagctgactggtatatcggtcttaatgcaactcgtgctttaacgactcgctttaatgcccagttaaattgcggccgtgtacaaacccctactgttgctatgattgctagtcgtgaggatgaaataaagaacttcaaagctcaaacttactacggcatcgaagctcaaacaatggagaagctcaaacttacttggcaagatgcaaatggcaatagccgtagttttaataaagaaaaaatcgatggtattgtaaaaagtttagataaacaaaatgctactgttgtggaaattgataagaaacagaagaagtcattctctcctggtctttacgatttaactgaattgcaacgtgatgcaaataaaaagttcggttactctgctaaagaaacattaaatattatgcaaaaattgtatgaacagcataaagtactaacgtaccctcgtacagattcacgctacatttcatctgatatcgttggaacacttccagaacgtctaaaagcatgtggtgttggagaataccgtcccttcgcacataaagtattacaaaagcctatcaaacctaacaaatcatttgttgatgatagtaaagtaagcgatcatcatgcgattattccaacagaaggatacgttaacttcgcagcattcacagataaagaacgcaaaatttatgatttagttgtaaaacgtttcttagctgttttattcccagcattcgaatacgaacaactaacgttacgcacaaaggtcggcaatgaaacattcattgcacgcggaaaaacgattttacatgctggttggaaggaagtatacgaaaatcgatttgaagacgatgatgtaactgatgacgtaaaagagcagattctacctcacattgaaaagggcgatacattaactgtaaagttacttatgcaaacatcaggtcaaacgaaagcacctgcacgctttaatgaagcaactttactttcagcaatggagaatcctacaaaatatatggatacgcaaaataaacaacttgctgatacgttaaaatcgactggtggattaggtactgtagcgacacgtgcagatattatcgacaaacttttcaattctttcttaattgaaaaacgtggtaaagatattcacattacatcaaaaggtcgtcaattacttgatttagtaccagaagaattaaaatcacctacactaactggtgagtgggaacaaaaacttgaagcaattgcaaaaggaaaattaaagaaagaagtattcatttcggaaatgaagaactatacgaaagaaattgttgctgaaattaaatcgagtgataagaaatataaacatgacaacatttcaacgaagtcttgtccagattgcggtaaaccaatgctagaagtaaatggaaaaaaggggaaaatgctcgtatgccaagaccgtgaatgtggtcatcgtaaaaatgtatctcgtacaacaaatgctcgctgtccgcaatgtaaaaagaaactagaattacgtggtgagggtgcaggccaaattttcgcatgtaaatgtggctatcgcgagaaattatcaacattccaagagcgacgtaaaaaagaatctggaaacaaagccgataaacgcgacgttcaaaaatatatgaaacaacagaaaaaagaagaagaaccattaaataacccattcgcggaagcattaaaaaaattaaaatttgattaaacaaaaaggttcctacctctatcggtaggaaccttttattttagtgaatgattttacttccttttgcattctcaacaaatttttcacttgatttgttaattggtgttttcagtaataacgcagcaacaatcataactactacgaaagcacttaacacaagtaaatctcgcgttacgatatcccaaagcattccaccaactgtttcacgaattgcgctaattgcgtatgtgaatggtaagaacggataaatcgcttggaagaacgctggtgtcatttggattgggaatgttccgcccgatcctgctacttgtagtacaagtaaaataatcgccatcgatttcccaacgtttccgaaaatagaaacgagtgagtatacgatacaaacgaagactccaccaataaataaactaaataacacaaaccagaacttatcgactacgtacgtaccgagtaagaatatatctcccatcgatacgataaacgcttgtgaaagacctatcgttaagaatgttaataaacgtccgaagtaaatttcatggctcttataattcgcgccctcttcgtgtacttctaccgttaataatgaaaccattaataatgcgcctacccataatgcaagcactgtatagaatggtgacatcgctgaaccgtagttcggcatcgcaaataatttattttcttttaaatttactggattcgcaaagtaatcactttgcttctcaacatcgtttttcaataagcgtatgatgtcttttaaatcctcttcagattcaaaatcacgaattttatctgctaattctttaatctttttctcagtagctggcatttcagctttaatgtctgctaatttctttttaccatctactaaaccttttgatgaatcttctagtaattttttaacatctggaagctttttgtctgcctcttttaaaatttgagatgtatttttagacatctcttttgtgcgagcaattgctgcattgaaatttggagtgatttctgagtcatatttagctaaaatgtcaccaatttggcccgaaacacttttagacacttgattaatactttcaataacatcagctgctggtttttgacctttattaatagcgtcaattcctttatcagttaaatccattcctttttgcaaaccatcttttgctttatttaacttagaaattgtaccattaagatttttatcactattcacatcagctaacactttatttgtactttccagaactggaatcatgtcattaactaaattccaacttgctttgaactgcccattcaaatcatttaaggctacttttgtagaatctaatccgttaacacctttgttacttaagtcttctcttgctttttcaagctccgtttttaatctactgtaatcatttacagctttatcatatttctctctaccattgtttaatatctcattagccttatttatatcttgatttaaattgcctctaagctgctgtgcattttcttgcgcattttcagccttacttttcagttgctcagctgtacttactgctttttcaaaatcagctacaaacgttgcattataatccttttcagcttgatttactaaattatttactgcatctaatttttgatttacagcatctcgcacatcttgtttaacttcttgtccggaactaattaaatctcctacatgcttaaccctattgttagcgtccaccatagaatttttaagcaccgttaaactttccactctgtttccaaagaactgtttaccgaattccgtggaagctgattccttgaaagctgtaaagaaatcaatcaaatatgaaacactatcgatacgctcttggaggagctttgaagcatcctgcacatttttctgtgctacagctggatccacgcctttattttgaaggccatccataacactctttacatatgccgttccaacacgagtagaattgaaaacagtgtttacagtttgatcaatatttttagcaatatttttatacccttcaccattcacttgtggtaatgctggaatctctggtatttgtggaatagttatattaggtaagactggtaatttagctggatctggcaatgtcagattaaagtcaaatgccggattttttaagtaatccgtaattttcgctgcagcatccaatccctgctgcattactgttaaattatttttaatagttcccggagcgcgattcaatgtttcatcatttctcgcaaagaatttatctaaattccctaacgcctcttgcccatcattcataacactctctacaaccggcaactctttttgcgctactttcacaacatcttctgctcgagttgcatcatctaacgccttatccataagtgtattcatttctgggaactgcgcttctaacttaaatacaagatcttttactttttcgatacttggtaagtttgtttctaaatcgattccaaggtcattgaaaattttaaaaatctcaccgtttgctgtttttacaaagtttttactaatttcttctgtaatacctgatgcaccttttgctgtaatcttcggtgcaatcgcgtttactttttcattcacatagtaatccagttctggttttttcggattttcatccagaacagttgcaattttttcagagaagtcttttggaatcgtaatacttgcataataatccccacgctcaactccgtaaattgcttgtttttcatctacaaatttccagccaagatttttgtttttcttaagggagtctacaatctctttcccgatattaatatctttccctcttaaattagaacctgcatcttggttggaaactgcaatgggaacctcttttgtatttccatatggatcccaagaagctttaatgttaaaccatgcatataacgatggtaaaatcattaatcctaaaacaataacaattgcagcccaatgtttggctacattccgtaaatctgtcttataaatacgccaaatttgtttcatagaagttatcacctaattatatatttttccttctttagaaaatgatacatgcattttgcaattatatcactttctacatcgtgtattaaccaaaaacgtactattttttcccattaactttcacttacttcattatataacgaagtgagtcaaagtatgaatacaaaatgaccaaatcggttttacattcaataataacaaatatatatgaaatgtcataaaaaatacaagtattttctcttggaaatacttgtattcctaaaaaaaatcctcacagcttttattctctgtgaggatttcttctattatatatccaattgaacctctacaccgaaatgatctgaaattacatttctgtttgtaccattaaaaataacttttgaagaatgaacttttttactttggttacacaatattagatcgattcgcaaattatgtttattttcatcccaaccagcaatctcaccttggacagtcgttccttcatccttctctattgctaattcatatgtgtcatacaaccctttttgcatcatatactcataaccttcgccttccaaccgagcattgttattaaaatcccccattaagaaggcgagcttattgctatctacacgctccatcaaacgatcaacttgacctttgaatgactcttcttcatcattccaccaaccgagatggcaagagtaaaacgttatatccttaccattataagcaattgttgtacttacaattttacgtgttttccaatacgttgtatcctcgttttctgaaatgaagaacgtatcttcttttataatattatgcttcgttataatcgctaatccttcttcatacacgtcataaccaatatgagagaaatcccaagtaatattgtaatcttttacatgtagcgcttttaactcttctaatagtaaaagtccaaaattatcttctttcttgttaccgcatacattttcagcttgtatggactgacttacttcttgcaatgcgatgacatcgtactcttcttcttgaattactttagcaaggtattgtatcttttctatttgattctcttcttgccaagaatgacagtttaaagttagcaatttcatattattacgcacctaacatatcttgaatgtctgactttaatacgtcagctttcggaccatataccgcttgtacacctttatcttttacaataagccctagagcaccattttgtttccactgtgcttctggtgcaacaacatctaaatcttttactgttacacgtaagcgcgtcatacaagcatctacgtcagcaatattttcttttccacctaataaatcgataacttttgttgctagtgaaccgtcttttacatttcctgttccttctgatgcctcatcttcattatcaatatagttacctgcacgccctggtgttggtaaattgaattttttaattaagaaattaaatagtgtaaagttaagaccgaagaacactaatgaaacaataacaaagttgattaagtctcttgttaaacctgcgttaaccatcattggtgtacgagtaattaactcaataaatccaaatgcatgaacacgtaagttaattaaatcagctagcgcgaatgcaagtcctgttgtaatagcatatacaacatataatactggagcaataaacatgaacatgaattcaattggttctgttacacctgttaagaatactgctaatgctgctgataaaaacattggtttatattttgcacgcttttctttatcaacgttacggaacatcgcaaatgcaatccccattaacgctgctgttgagccgataacttgtccagctttgaaacgagctggtacaacgttatttaataaatcgttatatgccttcgtatctccatttgctagtaaattatttaaatctgtaatccatgcaagccataatggatcttgtcctgctacaacttgtccaacttttgaaccagttagcatcgtatatgttccgcctagctctgtatagttcatcggaatcgttaacatatggtgtaaaccaaatggtaataataaacgctctaacgttccatatacaaacggtgcaacaactggtgcactatcttttgaagctgcaatccagcgaccaaattcatttaacccactttggatgaatggccatagaagtgataatacaatcgcagtaactgtagaccaaagaattacaacgaatggtacaaatcgttttccattaaagaatgctaatgcctgtggcagtttattatagttataatatttgttatataaagtagctcctaagaaacctgtgataatccctacgaacactcccatgtttaatgcgggtgcaccaagtacagaagtaaagtaatcttttacaattaaatctcccgctattactgaagaaactttcgcttttgaatccgctaacatttcagcgtttaccccaaatatagctcctgtaattcggtttgttaagacgaatgctaatagcgctgcaaatgcaccacccgcgcgatctttcgcccaagatcccccaattgctactgcgaataagatgtgtagatttgtaatgattgcccaaccgatgtcttccattacgcgagcgattgtatgaactgcgttaacatccccagcagacataccaattaacttaccgatggaaatcattaaaccagctgctggcattacagctacaacaactaataaagctttcccgaacttttgccaaaaatcaaaagacgtaattttcatctgttcttcctcccctttatttataacaacataatgatttaaattataatttctgttccctttatgaaaacgattccttatattactttatttttatctttgcgcaaccgttttcataaatctattttaataaaagcgttttcactttgcaatagaaatttatttttttcataaaaaaagatgctcaaagagcatccttttttattatgaaatgcgataaacccttgtttcataaggttttaaagcaattgttgttacttcttcatgttccgcaacttcatagttatttaaaagcaaacgtttgcgttttagtgcaaatgaaccctcattatacacagcttcctcttttgagatattactaattacaatgactttttcatcctgtaacgtacgtgtatatgcataaatttgtggatcttcttctaaaagtaaatcgtacgtaccatagttcagtacatcgtgctcttttttcagagcaatcattttcttatagaaattgaaaatagacttttcttcatttttttgcttctcaacattaatttctttgtaatttggattcatgctaaaccaaggtgtactcgttgtgaaaccagcattcatctcatcattccactgcataggtgtacgggaattatcgcggcaagaagcccatataatctccatcatatcttgatgtggtacgccctctgcaattttctcgcgatataaatttttaattgctacatcatcgtaatcttcaatatttggcaactgaacatttgtcataccaatttcttgtccttgataaataaacggtgtaccgtgcataaagaaatacatcgctcctagagctgttgcactttcacgccaatattgtttgtcatctccccatgttgaaacgatacgtggtttatcatgattctcaatatataaagcgttccatcctttattttccaatcctttttgccatttcgttaatacttttttcaatcctacaacatcaaggtctttcttcttctctgcatcccataaacttaaatgttcaaactggaataccatattgaacttaccttgctcttctccaacccaaagctcagcatcttcaatcttaacaccatttgcttcaccaacagtcataatatcgtacttagagaatgtattttcttttagctcttctaataaaggttgaatacctttcacattcatatgtttatcaaaagatggcacatattttaactcttttggatttggcatatccttgaggccttcttcttttttaatatgactgatcgcatcaacgcggaaaccatcaatacctttatcaagccaccaattaaccgtatcatatagtacttcgcgaacttctttattctcccagtttaaatctggttgtttacgtgagaatagatgtaaataatattgttctgtttcttcatcatattcccatgccgaaccattaaaaatactttcccagttgtttggctccgcaccatctttaccatcatgccaaatataccaatcacgcttcggattatctttagatgaacgtgattcaataaaccatggatgttcatcactcgtatgattaataactaaatcaataataagcttcatatcacgcttatgaacttcatctagtaaagcatcaaagtctgccattgtaccaaactcatccataatatcttgataatcactaatatcataaccattatcatcattaggcgacttatacattggacaaatccaaattacatctatacctaaatcttttaaataatccagttttgcaataataccttgtaaatctccaataccatcaccatttgaatccataaagcttcgtggataaatttgataagcaaccgcttctttccaccatgtcttattcatagtcattctctccttttgcatcccatcggaatttttatgcaaacgttttcgtaacactatcataacaaaatatgaacagtttgcaactgttttcattgaactctatgtagattctttattcttatgctttatttatttctcacaaaggtaaatctcattcttcacctcttcttgaaactggtagcccctctctctttatagaagaagttccttatataaaggctgttgaattttttaatggcggtaacatccctgaaaatttcaagcgctctggttcctatgtctataaacctattccccttaaaggcattcaaatcatgcaatactttctttctcatgcaccgaataaagatgctagtatttggcatcaatcgctcataggtgctgttgaaaatatttcgccgaataaaacggcttattttcatcgtaaagcaattattgctcaagaatacattacctcttggtgtaaatgtcaagataaacatgtacattttcgcttgtttaagcatgtacaaaatcaatcattttctttgctaaaatgaattttccttttattatacaagaaataccctatagaatagacttttttcaagtgtctattctatagggtacattttattgaggtctgctctttttactagattaacttaaaaatactcttaatttgtctagcaaataaccaatttttcgtaccgtagttatcatttaaactatctaaattgatagattgtccgttagcaaactttaattctaacgtagtatttttgtcatttgtttttaagttactatttgtaatgtcatcatactttaatttttcaatctcaacatattcgtctttttcttgtccaatcacgacatggtcttggaagaagaaaaagacttctacttttttaccgaaacaaaatacatttttcgtataaattaatgtcgcgttatcaagtccgacacatacttctttcatttcttccacaacgtgtccaaagtcttcttcatgtcttgcatttgattcagcaatccattcttcgattgttttcatgttaattgccatactgcgccccctggttcgttcattgcttcgtttaaaaaataaatactatatgaaaatataagcgatacgtaatatgttttcaaggggaaacggtatattcaaaataaagtgaaactttaatcagtggggtcttactgcccgcaaatagcaggataaagttaaatttcaaagtaatataaaaggaacaccaatttcattaaattttaaacgtttgaacaagacattcttcatcatcaattagctgcgctctctcatcaaattcaatgtttaattctttatatactttcttccaaaacgacactgctggtacattttttagaagttcgataacgaaatattgtcctcttttctcttctagtaaattctcaactacttgtttaccgattccttttcctttatattgattcaatatgaaaatatcattaataccaaaatcattttccttcttcaaaaacggacgttccagtagtaataagaatcctacaatactatgatcaacttttataaaatacggcgtgattccgtcatttttccaaaacatatgcaaatcttcgtattcaaaaaatccgttcgctccgatagttatattcatagtgaacttagaaaggtcatgaagatataaagcgtacaaattacgtaatatttctttttctgattcttgaaccttttgaagtgctacaatcataaaaaaactccccttcctcatatgtaactatttcccgatcctcttcattcgacaaaaatgataattcccctttaacaaaaaaatagcactttaaaaagtgctattctgctctccttgccgcttgctgaattggatcccacacgctgttatatggtggtgcataacttaagtcgacatcttctaaatcgtgaatactcattttattgaaaagcgccattgcgatcacatcaatccgtttatctaccccttcttctccaattacttgcccgcccaataattgtttcgtatcggagcgatatagtaattttaagtaaagtggttttgcatttggataatagcccgccatatttgtagaatctactttgactgttttatacgggatgtgtagccctttcgcttctttttcatttaatcctgttcttgcgagtgtcaaatccataaatttaataatgcctgtacctaacgtacctttaaatgctcttcgtttatccagcatattcagtccagcaagtcgcccttgtttattggcagtcgttccgagcgggatatgatcatgaatttcctttataacgtggtaatgtgttgcgcaatcaccggctgcatatacgtcttgcacattcgtttgcatgtatgcatttacttcgattgctcctttatgattcttacgtatatttgtcccttcaagaaaatcagtatttggcttcactccaaccgacattaaaacaagatctgctttatacgtacctttatccgtttcaattgcttctactcgttcattccctttgaatgcttttacattttcattcgttaaaatttcaatatgatgcttatctgcttctttatgtatatattccgccatatctgcatcataaattgtaccgatatgatcatttctctcaatcattcttactttcttaccaagttcgacgaaagtttctgccatctcaagtccaattgcaccgccgccaataatggttacatcttcaactttattcgtttctagcgtttttaatatgcgctcagcatccggaattgtttttaaaagatgaacaccttgtaattcccgtccttcccattctggcataacaggacgcacgccagtcgcaattaataaacgatcgtatggaaattcaaagacatctttcgtcttcgtatgctctgcgtacacaattttcttctccgtatctactttcgttacttcatgtcgtactttcgcatcaattccgtatttatcacgaaacgtctttacattacgcgcgattaacttttccgttgaagcgatagcaccactaatgacatacggtaacccacactgcgcgtacgaataaatttcacctttttctaaagttacaacatttgcatcttcatcgtttctaacaatttgcatcgctgcactcataccagctgcatctccgccaataatgacatagttcactttaccactccttcttttttacatactctttacgttttccatattttatagaaataacacctacttccattgtaaagaaagagaatttcatcttcaaattttgtgcacaaacttatgcctgaataggtaactgtcgtgtcttataaacaacatgtttaatatcctataacagtaaccagttgaaagtaggtgaaacatacatgtgcgccggccttctcgtccagcttccagaggaaccgatagaaccgaaacccgccctcccgcttgaacaggagtttacggttagtgtaactttatacagtgctcgtgcttggttatctgacaatgacactttctcacaaactatctggaaagctacccgcttcgcttcttcatcacatgctcgcaaggccatctttccagtcggtactgttaaaattttaaatttttctgacgatacaataacagttactgcatcctcagaatcagatgatgctcttaaaataatcgtccctcctcattctgaagctgctttaacgtctagttctttatctgatgtgcaagccagtacatcaggaggggcaagtaaagtcacatttctctttcatatctttttctctagggaacctcgtccagccaaataacgatagaaaaggtacagtaatatacactgtacctttttcccgcgctctattctcttgatttaattagttcaatattataagtttcgatatctgttaactttcctgtaaaataaggattttctctataccaagactgttttgcaaaatacgcttgcatatctttcgtttgaaaaatatgtccatgccttgcatatatttcatttctagcaattttcaactgttctttcgataaatatgttaaatctgtgctcgttaattttcgaatatcactatcaggaaagatgaaaccattatatacatacccagttgcgggcgttggagtaacattataaacaactgttttttctgcacttttcgtttggaatggaagattataagacgaaagtgccgttaccgtctctacttttgtcgtttcccgtccattttctccatttcgttctaaataaattttcgcgcttccatcagtcgctacaggcccccatgtaatttcttctcctgcgagcgctgtaactggtttttgatttacgtacaatgttgcaccaggcgcgttcgtttgaactgtaatatattgaccttgcaacgttaaatctatcgttacgttattttggctttgtttcataagtacaaccttttcctcacgtgatagttttacgtagtcatttttatattctgattgaaacacttgatttcccggaagaaatggcccatattgcttctcaaactttttgtcatctgtcttatcaatttcttttccgttcatttttaacgatacgtctttttcatttgaaagcaaagttgcatagtacgtcttcgctttcaatttatatcgatcaaatataaagaaatactttccgtctttcgttaatgaaaaatcagctctttctattccgtcccgttgtttttcaccttgtctcaaatattcttttaattcattcacgtaagatggattttcttttatatatgaaaatagaggcgttacgctctctctcgttatcataaccgatggatcatctgccgtaacgatctcagctaatttctctccgtccctctcttgtaaaatcgtaatcatccggtctacttgtgccacctgcgtataatacgacaatccgtacaaatacaatccaataatcgctataacaaatagcgctaacagtgtaatgccaacttttacaccaccgctcatgttcttctttactacagaacgtcccctcttcgtcccgcagttttgacaaaactgcacaccatcttcaaactgaactccgcactttgtacatacattcatccagtcaaccaccttttcattagaagccagttattccctgtgttaaggcttgaattatcgtgctaatgtaagaccaaagtacaatgaatgttgcaattccaattaaaacatttgcaataataagtgtgtaaacgagatctaatccgccattgtctagctttaatacggctacagttatactaatccctatataagttgcagctacggataataatatcggtaagaaaaagattaataagaaactaaaaagaaaagaaaggactaatatgacaatagccggcgtcgctatcgttccccatataccgaatacttcaagaaacgaaaaagatgatttcatcatcttaccacttacaaaaataataaatccgacaaataaagttaaaattaataaaaagaaaaagaccgttatagattctacaaaaaacgtgggagtagatatatctggtgcaaatgttctcgtaactgctgatgctgcactcatcattctataaaaaatacatgctcctaaaaaacaaataagaacaagacttacaattccatttcgtacttcaatagcgccgctttgcataatcgctgtcggtgcttgtaatgcatgtttaaaaaattgaaaatagccgctcgcaaaccgcttcgcttgctctaccgtttcattttgccgagcttcctttgcttgtgccgcacgtgcttgttccggcccttcttcttggccactacttgccactacttcttccgttaacgaatgtccacaattcccgcaaaattttgcctccgctgcattttctgtatgacatgacggacatttcattctcttatccctccttaaggatataccgtatagggtgttacaaattcaatatatgaatttgtacataaaacatgactacaagaaaaagattctgaaatccttcttccgaaagaaaatatatgtgctagtaatcttgaaaaaaaatgctattatgaaacagaataaataatatttttaacagattggatgactggcaatggaattggtaaactcaatttttcaaatactccttacaagcgtaatccaattattatctttaattggcgttatcattgtaattggatttctattaggctatttagaatctctcacacggatgtattggtcgagagcttttggacgaaaaggattcctattaacggcttggattggtgttcctattcacgaacttggacatgccattatgtgcgtgctgttccgtcataagattgtagcaacgcagttcttcccgacagatacaagtcaaggggctttaggttacgtacaacatcaatacaatcaaaaaagtgtgtatcaacggattgggaatttcttcatcggcattgggcctattatttctggtattactgcgttaatccttttaatgcgctatttcgtaccagaatcatattttttatttaatacaactctcgaaaaaacgattgcttctacttctattaatgtagaaatgatccaaaacatgctcttgtcgacgtttgtattattgaaaagcttatttacaatcggcaatttattgaatccttccttttggttatttttatttatcgccatttgcatttccgcgcatatcgctttaagtaaaccagacattaaaggatcaatagacggtgttgtcgtcatgtttatcgtgttatttttattcaacataatagcaggactgtttcaatacgacagtaatcagctaattggacaggttatgaaatataatatgtatctcattgcgttttctagtgtggcactgctgttctcttgtctttctacactcgttagtttttcgttttataaaataagaagagggcgttctttttgaacgccctcttcttattaattattccccttataatcacaatgctcaacaggcacacgagcatgcccctcttcatcggtacaccatgactgtgattggaaggcaagaaagataccgatccattcttcttccttttcaaagtgaatgagtattcctccatcttgccatatgccatcatcaccttgccatttttctacattcccttgattcatatgaatatcatgtataccgtttcctggtttgaaatgaaaataggaatctggtgtattttcttctggtccccatctttcaccaaacgcgtaaataattgctttttcttctattgctcgttttatataacgttctattttttcatttaaatcattatctgctcctgctttttcgggaggcaaaggaatcatttgatttgagtcaaatagatttcctcttacataatctaaagctactttcggttcattgttttttatttctgtaaaatcgaatggtaatgtcggtaaaatatgaatcgcctctgacttaatattgttactcgcaaaatataaaacttctgacggatagctttgcgattttacgttaattgcaatacgataatttactcctgtctcgccctgtaaatgaacttgataatgaggtgttttcccttttccaatctttgattgtataactgtaccttttaacacaccgtagttttttaggggcatacatttcatctcctattcatttagtagaagctattcatatttaaatcattatccactcataaaaaaaatcctcctatgttaggaggatttttaatttctcaacatataccaaacaataacttctaccactacaagcaaaatcgcaccaaagatcattaacgtcgtcttctttaatagttcattttcacggtaagggatattacataagtaagcacctagtgtaatccgtgatggacaagcaattgtcgctactgatgatgcggtgttttgaagtgttgtgacatattgccacgggagtgctacgttttgtgcggtttgcatttgtagttttataaacattgcatttgatcctgcgttactacctgttaaaaatccaccaatagcgccaataaacggagcaacgaaaacgaaaaaggttccaaatgtttcaccagctgtctttgcgagtaatgaatgcatgccagatgcacccattagttctgaaatggcgataaacattgtcgtcgtaatagcaaatggaatccattgtttaatcgtttgtgagagtgattgtttaataatattagacgggatgcggaagaaaataatagtaaataagcaagtcataccgagccaaaatcctggtgaatatagtaactctagtttgtaagagtatgatttcaaatcaagaaccgcatatgatctgaacaaatcatgtaatgctggaacgaggcgagaaagtaaaatacaaactgttagaaatatataagggctaataatttttataatggatacttctctctccgttgcagccgcatgttctgttataagattttgcccactttttccttttaatttaatgataaaaaagccaaaggtaatcgtaacgatagaacttaatatcccggctagttcaacacttacgtacgcattagaaagatagattccgagagaaaataatagaaagaaccctactccttctttccacttttctataaccgcttgccagccgccaacaacgtgtaaagaaagaataacgaagtaagcaaacatcggaatacttaatagcgctgtatttgtgccaaatgttgtaagaggcatatttattagctgcgaaccgataatcgtaccagttgccattgcgccccatgaactagctagtaagccgatgaatgagagtagtacagcttgaaatggtttatatcctagtgaaagaaaaataggtgctgcaaccatgaagccaataccgaatccacttactgattcaataagcgggcaaatgccaaaacacataagcagcatttgtaataagcgatcctgagtaactgcttctagaaaacgtgctacttgatcgatgtaccccattttgttcatgaggtgaaataaaaaaataccgaaaaataaaacgtacccgacaataaaacaaattaaccatcctttaatcgttgcgtgcacagtttcacttatccctaattgaaacattggcgagagtaaaacgattccaacagacacagcataagaaattaacgaggaccttaatgacgtttgtttaaataaaaataaacaaatgaaaatcatcataattgggataagtgccaacaatatggccatgttatcatctcatttcgtttaaaatacaatttttaactattatataacagatactataattttcaattgtttttacaacagattcaaaaaaggaaccaaacggctccttttcattcactcccattttctattatcctgaaaaacggtctgctttccgactatttctttcaacacaacaaacacaatgtaagtacatattgcttgcaatataatattccaaaatttcattaatgtaaatgaatgaatccgtagaaataattcgtttaataatacaatcgaaacgatactaaataattctatactaatcgaaaatagacatatttctaaaatagactgttcttgaatgcgatttaagttggaaaagatgaatacataccctaaaaatagagccattaactctattttcgtcatgctaatgagccaagcgtatagcggtacagttaaaaatagatatagtagtttacgtcttagcatgccttctcaccctctaaattatatgtattttctgtatattttaacatttattacgcaaaacaaaaagaagagactacgcctcttctttttgttttgttgcatatattaattcacatatttcttcttgcttttcattttctaaaagctcaatgatcttacttccaacgacaactccgtcgcatattgtaaccatttcttctacatgttcttttgttgagatgccaaatccagcgactactggtaagttgacgtgtgattttactttttctaagtaactatgaatctcctctttaaagttttgacgtactcccgttacgcccgctactgtaacagcataaacgaacccttctgattcactcgtaattttttcaattctttcaataggactcgttacggtaacgagtggaatgagcgcaatgtttgcctctcgaagtaacgacgcaataatattttgttcttcatacggtaagtctggaacgatgatgccgtctacacctgcttctatacagttttcgatgaatcgttcttttccgaatgcaagtactggatttaaatatgtcatgagtacaaacggaatttgcacttctttccttacctctattaatgcttgaaaaataccttttactgttacaccgctatctagcgctcgtttccctgctctttgaatcgttggaccgtctgcgactggatccgaaaaaggaatgccgatttcaacgatgctcgctcctgcttcatctaaaaaacgaattctttcttttaatttttcaaagccaccatctccgcccattacgtacggaataaatgctttcttaccattttcaaacgctgctttaattttttctactcccattttttacacctcttccatataacgttttatactctctacatctttatccccgcggcctgataaacaaataacaagtccttcgtctttcttcatttgcggcgctaattttaaagcgtatgcgacagcatgtgagctttctaaagccggaataatcccttcttttttcgttaataattgaaatgcttctaacgcttcatcatctgtaatcgaatgataagaaacacggccaatatcttttagtaagctatgttctggcccaacacccgggtaatcgagccctgctgaaatagaatgagcttcttgaatttgtccttcttcattttgcagaaggtacatcatcgatccgtgtaaaaccccaacgcttcctttcgttaaagtagctgcgtgctgttctgtatgaacgcctttccctgctgcttctacgccgtaaagagcaacttcttcatcgtgtacgaatggataaaacatacccatcgcattactaccaccgccaatacaagcaacgactgcttctggtaactttccttctaactcctcatattgttttttcgtttcatttccaattacactttggaaatcacggacaatttgcgggaatggatgtggtccgagaacagatcccataatgtagtgcgtatcgtgcacgtgtgcaacccagtaacgaagcgcctcatttaccgcatcttttaatgtgccgctacctgccgctacactttctactttcgctccgagtaattccattcggaacacatttaatttttgacgtctcacatcttcttctcccataaagatgacacattctaatccgagtagggcacatacagtagcggttgccactccgtgttgtccagcccctgtttcagcgacaacttttttcttgcccattcgtactgcaagtagtgcctgaccgattgtattgttaattttatgagctcctgtatggttcaaatcttcacgttttaaataaatctttgcaccaccgcaatacttcgtcatattttcagcgaaataaagcggtgtttctcttccaacgtacgtttttaaataatgatttaattccttttgaaacgcttcatcttgcatcgcttctttatatgcttcttctagttctaatacagattgcattaacgtttctggaacgtatcgtcctccatatataccgtagtgacctttttcatctggatatgcgtaattcatttggaacactccttcgcttgtttaataaattgttttattttctttagatctttctttccttctgtctctactccgctacttacatcgaccatgtatggctgaatagttcgaatcgcttcttctatattaagagcgtttaatccaccagctaatatcgttttctctcgcaactcttctggcatatgcacaagtagttcccatgaaaatgtcttcccatttcctccgtgaaacttttctttcgggctatcaaacaatatataatccgtttcatatgtttgagcatttttcatatcactttctgaagttactcctagtgattttatagacggaatattcaatcttctaatttgataattatcttcatctccatgtagttgtacatgtgttaacccgcactcatctgcaattttctggatcacttctactgattcatttacgaaaacaccgatttttaacacgttggctggaagctcctgaatgatttcttccgctctctttggagtgattttccgcttactttctgcaaaaacaaatccgagtgcatctgcgccgtattcgcaagcacgttttgctgtttccatatcagtgatgccgcaaattttcactttcatatattcaccttacagtcttcaaaaaagttactaatagaagatgatgtcataagtgcctctccaattaatacaccttttgctcctgcttttttaacacgaataatatcctcttttgaatgaatcccgctttcactaatccaaagtaatttctcctcattcaatctttttccaagcttttcagtttggcttaaatctacttcgaacgtttttaaattacggttattaataccaataacgtgcggatttaatacaatcgcagtttctaattcctgttcattatgaacttcaacaatcgcttccaatcctttttctaacacgtagctatacaactcttttaacttctctttcgttaacgctgctacgattagtaaaataatatctgctcccgcttcatacgctctatcgatttgaatcttatcgattatgaaatctttacataaaagcggaatgttactttcttctcttgctgtttgtaaatcgtgaaacgatcctttaaaaaattgaccatctgttaaaacagatactgctcctgcaccacatttctcatatgttcccacttgttttcgtacgtcaacgtgtaaattgatatctccttttgatggtgatgctcgctttacttctgcaatgacagtaaactgctgtaacgcttctacaagtgaatgtgtctttctttttgtttttactggtgtatatatttcatataactccgcaacttcctttttcttctgttctacaattttatctaaaatcgtccccactttagttcaccctttctaatttttcgttgcttgctacaattaataagtttaatttggctaatgcttttccagagtcaatgctatgtgccgcgagtttaattccttcttcaatcgtttccgtttttccatttgcgaaaagagctagacctgcatttaataaaactgtatcacgataaacactcttttctccgctcaatacttcaagcgtaatctttgcattttcttttgaattcccccctctaatttcttcatttttcactcttgaaaaaccatacttttctggattaatactcttttctactatttcattatcttttaaaaggactacgtgattttccccttgtaatgacgcttcatctaaaaaaccacttccatttacgacaagcgcttgtttccggcctaacttttgtaatacttgtgcaactggtaataacatatctcgtttataaataccgacaaattgtgtttctaaattcactggatttgttaaagggccaattaagttaaagatcgtcggcacgtttaactcttttcttattttcataatgcgccttagtgctggatgcatcgctggtgcaaataaaaatgcaatacctacatgctctagtaaataatcaatttcgtttggcgtactactaatatttacacctagttcttctaataagtctgcacttcctgttttactagaaacagcacgattaccatgttttgcaacctttacacctgctcctgccagtacgaatgctgatgttgtgctaatattaaacgtttgagcatcaccaccacccgtcccgcaattgtccattgctccttgtatatggttcgaaaacggcaatgccttttcgcgaagagctcgaacgagaccgtatatttcttctgcagtttcacctttcgctttcagtaagactaagaaagctgcaatttcactttctaatatgttttcacttaataaaagtagtcctgctttatacatttcctcttctgttaaatgttgaccctccactaatttacgaagatagttgttcatactctttcctcctcttttacttctgttaaaaaggcacggattaactttccgccttcttctgttgcgattgattccggatgaaactgtaatccgaagagcggataataattgtgacggactgccattatttctccgtcgtccatcgctgtcgctaatatgtcaaagcactttggcaagctcgtttgctctgcaacaagggaatgatagcgcatcgccgttaggggctgtgtaacatatgaaaagattgacgttccgttatgtttcacacgcgatgtttttccgtgtttaatacgctctgctctaacaatgtctcctccaaatgcagatatgatcgcttggtggccaagacaaatccctaatatgggaacgttcttataaaaatgacggatgacgtcgatacaaatgccagcatcctctggttttcctggtcctggtgaaagtacaattcctcttggattcatctcttctaactgttctatcgttatttcatcatttcttacaactacaatttcttcttcatgttcgcctaacagttgatacaagttatatgtgaacgaatcgtaattatcaataagtacaatcatttcattacctccaaaagcgctctcgctttatttaatgtttcttcatattcagctactggatctgaatcgtaaacgactcctgctcctgcctgaacgtatgctttttcatcctttacgaccatcgttcgaatggcgagcgccatatcaagatttcctgaaaaactaacgtatccaactgcaccagcgtatacatttcttttttcattctctagttcatttataatttccatcgctctaattttcggagctccagaaaccgtccctgctggtaagcaatacgctaacgcatcaaatccgcccatttgttttcgcaatgttccgtaaacttcagatacaatgtgcataacgtgagagtatttttctactttcatatatttatctatcgtaaccgagccgatttcgctcactctaccaatatcgtttcgcccaagatctacaagcatcatatgctctgctcgctctttctcattgcctaacagttcttttgcgatttcctcatcttccctcttcgttttccccctcggccttgtaccagcaattggattcgtcatcactttatcctcccttactgatagtaaactttccggcgaagaaccgagtacaacataatcttgaaaatcgatatagaacatatatggtgatggatttgcaattcgaagttttcggtataacccgaatggatccccaatacattcactttgtaaacgctgtgataatacgacttggaatatgtctcctgctcttatatattctttcgcaatttctaccatctcacaaaactctttttccgttatagaagaagtaaatgataatgtggattgtattgcatttacttcagcttcttctccttgtagcacttcctctttgtatactcgcagcctttcgtatacttcttcataatctgctgaatcatcttgcttgcatacatatacaaacgacaacttttggcgtaaatgatcgtaaacgataaactcacgatatagtaaaaggtgtacttctggaatatttaatgggtcgtgtaaatccgctccaatgttttcatactgccgaatgacatcatacccaatataaccaactgctcctccgcaaaatggaaatggactgtctacttgtgatggtgcaattacttcttctaacacttgtagtacgttaccttgtaacttttctgcgcggccgtaaatcgttcgttccactcccgtaccaacgcttttcacttctccataaggattacatcccaagtaagaataacgccctttatcttgatgaagctgtgaactttctaataagaatttcttcttccctttcatacgtctatataaagaaattggcgtaatgctatctccttcttcttcagtgattactaaaaatgtctttctctctcttttttgttttataaattcttctttcgtcatcatgtccttcacctcgctctgaaaaataaaaaagtcctctacatatcgaaaatatgtagaggacgataaatataccgcggtaccacctcgtgttggatgcaaaagcatcccgctttgttcaggtacaaaatttataccttatccttgtaacggcggaacccgggttgcctactgaaaataattgttcagcatacctctcgtaagcccattccgtatacggcaccgtaccgggctcccacctattcccggctctctgtaacgtctccaatatacgtactcttcttacttaaacgatttcatttatttaattttttatacacaaaaagggagtactcatcctatagaaaggacgggtactcccgtggtgccaccttaattcgttacaaatgtaacgcactttaccgtatcaaaaacaatacgtgtctcttgtatcgatgagatcatgtcgccaaagcctacttctttcgtttcggtttggaagctccgaagcccattccacatcaattccatactgattcgcaccaaccatcagctctctgacatgttcatcatgtgtactcttcttcatcaacgcttgcatttttttaagttgcactcattatagacctgacttttttcacaagtcaatactttttcaaaaattttatttttctttcctttcaatattatattgacaaaacaacctctttttatgtaaatataataaatactctattaaaaataaggttttttgtatgaatattatatattaaaaaagtaaaatgacatcaaaaaacgcttacatttctgaaaattcgtatttctatatggatttttcagaataatcatgatagattataaagtgaaactttaatcagtaggggtttgttcatcccactgattattagttaaatcaatcgggcatttacgggcagttgctctcccacctaacttccttgcccagccaattttaaggtgggaattttactgcccgtttatgcgggataaatatgcataacgcatcaaaagacatgacaaaaggaaggggaacttcatgagtacgcagatgttaactttaacttcaatctctatttacatgctcgggatgttagtaatcggctatttcgcctataaacgaacgtccaacttaacagattatatgcttggcgggcgtacactaggccccgcagtaacggcattaagtgctggagcatccgatatgagtggttggcttttaatgggattaccaggtgcaatgtttagcgttggattaagtagtagttggattgcgatcggcctaacactaggcgcatacgcaaactggctttatgttgctcctcgcttacgtacctactcagaaattgcaaataactctattactattccagaatttttggaacaccgtttccacgacaaatctcatatgctacgtttagtatctggacttgttattatgattttctttactttctatgtagcttcaggattagtttcaggcgctgtattatttgaaaattcatttggtatgaactaccacgttggattattcattgttgcaggcgttgttgtagcttacacattatttggtgggttcttagcagtaagttggacagacttcgtgcaaggaatcattatggtagtcgctcttattcttgttcctatcgtaacaattatgaattcgaacggacttggacctgcatttgatacaattcgatctgtagatccaacacgtctagatatttttaaaggtgcctctactttaggaatgatttctctattcgcatggggccttggttatgtcggacaacctcatattatcgtacgctttatggcaatttcttctgtaaaagaacttaaaagtgcacgaagaattggtatgagctggatgattttctctgttgttggagctatgtttactggtcttattggtattgcttactattcacaacaagagttgacattatctaatccagagacaattttccttgaacttgggaaaattttattccatccacttattactggatttttattagcagccattctagcagcgattatgagtacaatttcatcacagctactcgttacttctagtgctgtaactgaagatttatatcgtacattcttcaaacgttctgcatctgataaagaacttgtatttgtcggtcgtatggctgtacttgttattgcattagttgggtgcgcattagcgtttaaacaaaatgatacgattttagctcttgttggatacgcttgggctggatttggttcttcattcggacctgctattttattaagcttatattggaaacgtatgacgaagtggggcgcacttgccggtatgatttctggtgccgttactgttattatatggactcaattcaaattcttaaaagatttcttatatgaaatgattccaggtttcgctattagtttactagccatcgtaattgttagtttactaacacaaccttcaaaagaagttaaagagcaatttgaggatttcgaaaaacaacatcgtcataatttataaaaaaatctctgctgttatcataacagcagagattttttacagttcgacaatctttttatcaaatttaacaaattctttatgtttcgttaaatttaacataacactactcctttatagtatgagtatcagcacttatacagaaaggggactccaacatgttagcagctttccagcaacaacaaacacgaaaattttcacctatcacaaatacttctgcgtcttgtttaaacatgcaacctaacccgcctaaaatttcaattgctccttctgttatttcagtcatcggtgttcatatggaaaaacataaattaaaaataaaaacgggacaaaacattgtgttatcagcttccattttaccaatacaagcaacgaataaagagcttatttggtcaaatatgaattctgatatcatcaccatatatccaaaaggtgacaccgtgacgattactggaaaaagtgcaggtaaagcagtcgtaattgtcacaactgctgaaggcaaatttcgtgacctatgtgtcattcatgtacaaccttatatgacaaatccaaagtaaaagagtggcttcgtagccactcttttacttgatttcaatatttgagtttttactttttacaaggttaataaaaaattggatataaccatacattttttttgatggaaactctactaaactttccccgtcttgatttaagtcaatgaatctcctcctcttccctattacaatgaaaacaatattagaaaaggaggacatattatgactgaacgaaagtacgccttatttgctagcacatctcttcttgttatggcattcattgcatttttctcttacggttttgttcatggaaacctcgttatacaaggagatgcgagtacaacattccataatatccaaacttcaaattcacttttcaaagcggaagtttttgggtggattatcatttttatcactgatattgtcgctgcgtgggctctttatttctttctaaaaccaattcatactagcctctcattactagccgctttgcttcgtcttatgtatacagctatacttgggattgctatattcaatctaatattggcattattgctttcaaaaaatacaattgcaaatccagaaacatatacaatgttgtttctcagtgcattcgaatacatttggtctgtaggattgatcatttttggattgcatcttttcgttttaggctatgtagcttttctctctaaacagataccaaagtttattagtatactgctgttcattgctgctaccggttatatgctaattcacgtcatgaatacaatgtttacacaatacgatacaatgatttcactcatacaatcactattccaattacctatgattgcaggtgaattaggacttgcgatatggctactattgaaaggtggtaaacactctaattaagccgtttcttaattctacttaatgattctggtgtcatgccaagatagcttgctagctgatattgtggaacacgatgaattaaatacgggcgttttcgtaacaatgttttatatcgctcttctggtgtcgatgagataaatacagcaagttcatcttgtacttcaccgaaattgtactcgatcattttacgcgtcatttcttctaattgtgaatacttattatacatgtccttttcactatgtagatcaccaacaactacagtacaatcttctaaacacgttaacgtatatgatgaagatttatcttgtttatgatggttgaaattcgaaattgcctgctcttctgtataaaaatttgatgtaacttctttccctgcttcatctatactatgttgcctaacgcatccttttaatacaaaataacattttaacggaacatttccttgtcttaggagcactgttccttttttatattcttcaatttgtaattcactgagaatcatttgctgctcttcttcacttagtgttgtaaatctattcatatacttctttaatatctcttccattttcttcccccttctacgcccgtatttctataaaacaaaaagagaagtatcacaacttctcttttctcccctaacactataattcctgtgtatacactggctcatttacgacattttttgctgttcgcttttgttgctgcagtaagaaaacagatacaccaaacaatacgagcatgctaccgatcatttgcattgcatttaatttttctccaagtaagaagaacgcaagtatagatgctccaacaggttctcctaaaatactcattgaaattgtcgttgcatttacataatttaatagccagttattaattacatgtgacactgtcggcacaaccgcaagtaaaagaaaaacagtccaatcccacttcgtataacctgtaaagggtacttgtaatataacattataaatccccataaaaagacctgcgaacgcaaagactgtaaagctataaatccagtgcgatactttcttcactgtcgtttgcccgataaataaataaccgacaaccgctattacacttagaaaggataatatgtcaccataaattgcttgcttacttaaacctaaatctccccaaccaatgcacattactcctaaaatagcgattcccatcgttgcaatggctgaatatgttgttctttctttaaatagaaaaaaacctccaactaaagatacgattggttgaagtgccaaaataattgttgaactagcaactgttgtatgctttaaagattcaaaccataaaagaaaatgaagtgctaaaaagaaaccagatccaattaaaaagccccaatctttcatttgaatcctattaaattcctctctttttttccatacgataggcagcataataagtacgataatccataagcggtacatacttaatattgaagatggtgctgaggacatctttacaaaaactgctgcaaaggaaatggcaattatagaaattgctaatggtagtgcgattgatttttcttgtttcaaatcctgtctcccctctcacctgtcaaaaatcccacttcattatatccgttttctttcgcaacttaaatactaattttttagattcttcgtatcattatggtaaaatagaaattaaggcaccaattagtgaatatttctttccttttcactacaagcgtcgctcttacaatcgttacagtaaatttttatttagggggatctacatgagtcaaacaatagggagaattgaagaaatttcattttatagcgcatcacttcaagaagatgttacacttctcgtttatttaccagtaaattacacaccactgcacaaacatacagttgtaattgcacaagatggtagagattattttcagcttggtaaagcgcaccgtgtaattgagcgccttcgtgaaaccgaagaaattgaccgtacaattattgtcggtattccatataaaaatgtacatgatcgtaaagaaaaatatttcccaaatgaagtaaaaaatgctgcatatattcgtttccttgctcatgaacttgcaccatatattgatgaaaattatccaacgtaccaaatgggaaaaggtcgtgttttaattggtgattctcttggcggaacagtttcctttatgactgcacttatgtatccgcatacattcggtaaagtcgttatgcaatcaccatttgtggatgagacagtgatgaacttagcaaaagaattcaaagatccacaggcgttagaactgtatcacgtcatcggtacagaagaaacggctgtaaagcgtactgatggacaagtatctgatttcgtagggccgaaccgtgagttaaatacacttcttacagatagaaacttcatcacgcattatgaggaatttgaaggcaatcatacttggaaatattggcagactgatttaccgaaagccttctctcatattctatcaatgaaataatagagagcagtattcagaataatttgatataatagataaagagatttatttatctcaaaatctaactagacttacaaagggaggaattggaacatgaaattaggcattgtaatttttccatctaaaatgattcaagataaagcgaacggattgcgtaaacgttatgacccgcactacgcattagttccgccacatattacattgaaaacaccctttgaggcgcaagatgaacaattagagtcgattgtaaacgagttacatacaatcgcaagtaaaacgaaccctttcacccttcatgttgggaaagttggttcattcgcacctgttaataacgtcctttactttaaagtagaaaaaacacctgaacttactttcttaaatgaagaaatgcatagcgggttattcacgcaagaacgcgaatatgctttcgtacctcatttaacaatcggacaaggcttatcagatgcagagcatgctgatgtgttgggccgattacgtatgaaagatttctattacgaacaaccaattgatcgtttccatcttctatatcaattagaaaatggaacatggactgtacacgaaacattccgtcttggaaaggggaacaactaatttgcacgcacagattgtacaaacggacgaacaactaagagatgcattctctgtacgtaaacaagtgtttgtaaatgaacaacgtgtctctgctgaagaagagtacgatgagtttgaagaaatttcaacacacgttgttatatatgacaatgatgttccagttggtgctggacgttttcgcatccttgatggtataggaaaaatggaacgcatttgcgtgctaaattcccatcgcaaaaaagggattggaaaaattgttatggattctcttgaagcgtatgcaaaagaaaattcgctaccgaaattgaaacttcacgctcaaacacatgccgaagatttctataaaaaacttggatatgtaacaagttctgatgtatttatggaagcgaatatcccgcacgtcgtaatgataaaagaattgtaatttgaaagcaggaggtgatccctcctgtttttttacattgctattttctttttcttccgctaaagttaaatgttgatgctatagttttgaaggtgaacatatgacacaagaaaaattttcacaaaaatcgttaacacacgctgatattccgcgtgcgacatatcatattccgaaaacatctacccatttaattatggaagaagatgtagatgcggcttatttccgcgctcttgaacaacaaaatgtttttttaaacgaaaaacaattagaagccgtgcgcacaacagaaggtcctgttcttacactagctggtgccggaagcgggaaaacatctgttttaacaactcgcgttggttatttagtaaatgtaaaacaagttcatccacgaaatattttattacttacatttacacaaaaagcagctgaagaaatacgaagtcgtgttgcgaagttaccaggtatgaatcatgcagcaagtagctacgtagttgctggtacattccactctgttttcttaaaattacttcgtagtcaaggttataatcagcaaattttagcaaatgaaaaacataaacaaattatgataaagaaaatcttaaaagaattgcgtttaaaagacgattatgatgctgaaacgatgctcgcgatgatttcacttgagaaaaacaaattaaatcgtccgaaagatgtaaaagcgaaaacaccagtcgaacaagaatttaaagaagtatacgaacgttttgaagaggtaaaacaaagatacaattatattgatttcgatgacatcttattggaaacatattatatgttagaaaataatgctcctttactaactcaattacaacaacgttttcactatattgaagtagatgagtttcaagatacatcgtatgcacaatatgaaatcgtaaaattgttagccacgccaagaaataatttatttatcgcaggtgatgacgaccaggcgatatacggctggcgaggagcaagtcaccaaattattttatcttttccaaaagaatttgataacacaacaatcattgcactaaatacgaattatcgatccaatccctttatcgtcgggcttggaaatgaagttataaaattaaatcaagaacgttttgataaagagctatactctgttcgtgaggaaggtgtacaacctttttatgcaagacctgctacgactcttgatgaagcaaatcaaattttgcagcttattcaagaaaaagtagagagtggtgaacgtaactttaaagatttttgtttactgtatcgcacacattctgtaagtcgttcgttacttgatcagcttaccattcataaaatcccgtttattaaacacggagcgagccaatcattttatgaacattctttaattaagcctgtattagatcatttaagactcgtgattgagccgtttcgactagaatcactttcaaacatattgccgacgatgtatatcggacgtgatgattgtatttcatttattgaacgtgaacaatggaaatatggtgaggggcgcttcccttctcttcttcatttcttactattaaatccaagcttaaaaccttttcaagtgaaaaaggtaaatgagcgcatcgattttattaagtttattaaagaattagaaccgaaaaaagcattaaaagaaatcattcatggtaaaggaaaatatttagagtacttacaaaataacgatcgttcttcctttacaatgcataaagacatacaagaagaaatgttggaagaattaatggagtctgcaactcgtttcaccgatattccagcttatttacaatttatcgacgaggcgattcaaggtcaaaaagaaatggaagcattaaaaacaatgccgcaaaaagatgccgtttcacttatgtcaattcataacgcaaaaggccttgaatttccatgtgtctttttacttggagcgagtgatggaatcctgcctcatacttcttctttaaaagatgcaaatgatcgtgttacggaaacttctgaagcgttagaagaagaacgccgattactttatgttgccattacacgtgcgaaagaagaactttacatttcttctccgcaatttttcagaggaaagaaattagatatatctcgttttttatatactgtgcgaaaagatttacctgaaaagacatccactaaataaggatgtctttttttatatcacgttatgtacatccctcctatataaattccttgtttttatcgtgagaattaacgtaatatcagccatatcccactcatattgtaatagtgtatgtcagaactcacgagaaggagtgaacataatgagctgcaattgtaatgaagatcatcaacatgagtgtgatttcaactgtgtatcgaatgttgttcgttttatacatgaactacaagaatgtgcaacgacaacatgtggatctggttgcgaagttccatttttaggtgcacataacaatgcatcagtagcgaatacacgtccttttattttatacacaaaaactggagaaccttttgaagcatttgcaccatcttcaagccttactagctgccgatctcctattttccgcgtagaaagtatagatgatgatgactgtgctgtattgcgtgtattaactgtagttttaggtgatggtaccgctgtaccacctggtgacgacccaatctgtacgtttttagctgtaccaaatgcaagactaatatcaacctccacttgcattactgttgatttaagttgcttctgcgctattcaatgcttacgtgatgtttctatttaaaactaaataatgagttaagcatggattgggtggcagagtattctgccacccaatccatgcttaaagagtattcttatgtaaatttcttaaaattgggaacttgtctagaacatagaacctgtccttttcattaactgaaagtagaaacagataaaggagtgaaaaacatgttctcttctgattgcgaatttactaaaatcgattgtgaggcgaagccagctagtacactacctgcctttggttttgctttcaacgcgtctgcacctcagtttgcttcactatttacaccactattattacctagcgtaagtccaaacccaaatattactgttcctgtaataaatgatacagtaagtgtcggagatggcattcgaattctacgagctggtatttatcaaattagttatacattaacaattagtcttgataacgtacctactgcaccagaagctggtcgtttcttcttatcattaaatacaccagctaacattattcctggatcaggtacagcagttcgttctaacgttattggtactggtgaagtagacgtatccagcggtgttattcttattaacttaaatcctggtgacttaattcaaattgtgccagttcagttaattggaactgtagacattcgtgctgcagcattaacagttgcacaaattagctagtaaaaagcggtatttcttatacagaaataccgctttttatatataataaaaaacactcacagtagcatgagtgtttcattcttcatattgttttattgtgttcttctttttcccacaattgcatccctttttcttcacaaatccttgttgttgtaattgttcttgatatgcctgttgttgtgcttggtgttgttgctgtatatgataccactgctgcaggtcatatgaattctgccttagattattgctcacagcaaacatctcctctactgtcaattctgtctatttactatatgaacaactctttatttccgttccctcattcttttaaactccgctttttctcgtattatgaaaatatattattctcccataaaatatcctgtaattgtttcaatgattgctgccgctcctgcaatagctaataatgcaagtaacggttccgcaacgatagggatccaattatataagactaataaaaaagcactaacccatacacctgtacaccaataacagcttaataattcgccaatccactttcttaatccattacctttcacttttgtaaacgttgatacacttccatccggctccgtaatctctaattcatcaataaatggtcttcgcaaaaaggctgtaattttatcataaacaattaaacgagtgagcctaaaagcagctaacgcaaaaataaaaaataaaagccagcttgtaaacagcataattccacctacccttatcctctttcgcctatttaaaaaaaaaggtcttgagattgtgaccaaatctcctcgactccaatatcttattaatgtaaatacaaacaagaagataaggagtgacattaatgagttgtaacgaaaataaacaccatggctcttctcattgtgtagttgacgttgtaaaattcatcaatgaattacaagattgttctacaacaacatgtggatctggttgtgaaatcccatttttaggtgcacacaatactgcatcagtagcaaatacacgcccttttattttatacacaaaaactggagaaccttttgaagcatttgcaccatcttcaagccttactagctgccgatctccaattttccgtgtggaaagtgtagatgatgatagctgtgctgtgctacgtgtattaactgtagtattaggtgacggtactccggtaccacctggtgacgatccaatttgtacgtttttagctgtaccaaatgcaagattaatatctacaactacttgcattactgttgatttaagctgtttctgtgcgattcaatgcttacgcgacgtttctatcgtaaagtaaactaaaaaactattggggtggtagaagctttctaccacctttacatatttaaaaaccggccatactaatcgattggatatcatctatagacaacctaatatctctcatactattttgcggcataatagatacaatgccatgacgatacgatatgatcgatccaacatatgagactgtagctgtttttattctgcatcttactttcggaatgtaatgagggcggtttagtaaaaaatgaattttttcatcattattcatatccttaaatgatttattatacgggacagttcttactggttctggttcttgctcttcttgttctatgtgttcttctttttcttcttctattttttcttccacttgctgctcttcttgttgttcttgttctattacctcttccacagcacttcttacaatattttcttgtctattacttttctctttttgatcttcattttcaaagtttgtcaggataatcctttttattttcggtgcagcaagttctaaacttacttgcgtgatatataacaacggttttccaactgttgaacttttatttttattcttcacactcgtccctcccacttccatacgtagctaaataaatcgtgtactattatagttatattcatcacgtggtaagaactttcgttaaaaatcgttctttctaagaacaaataaaaaggacaatctcagcatttagagattgtcctttaaaaattaatattatatttatcctaggatatgataccctgaatcaacatgaatgttttctcctgttacaccgcgtgctaaatcactgaataggaatactgctgtatcgccaacttcttcttgcgttgttgtacgacgaagtggtgcgcgctcctcaatttctcttaagattgagttgaaatcgcctacaccttttgcagataacgtacgaattggtcctgcagaaatagcgttaacacgaataccgtgttgacctaaatcgttcgctaaatatttcacgctcgcttctaatgaagctttcgcaacacccataacgttataatttttcacaacgcgctcgccgccaaggtatgttaatgttaaaatatttccgccttctgtcattactttcttcgcttctcttgctacagctgttaaagagaatgcgctaatattttgtgcaagtaaaaatccatcgcgagaagtatctacaaattcaccttttaagtcatcgcgatttgcaaaagcaatacaatgtgctacaccgtgaatagtacctacttcttgtttaattgtttcaaagcaagctgtaagttcctcatcattcgttacatcacaaggtaatacaagtgattcttgtccttctaatgtgtccgctaattcacgaacgtttctttctaaacgttctcctgcatatgtgaatattaattttgcacctgcattatgcaaagagcgagctattccccatgcaatacttctttggttcgcaacgcccataacaacaaatgttttcccttgtaatagttccatgatatatcctcccagaaatacttatacttgttattagtacctgatactataattatagtaccataaaaccgcttaaaggcaaacaaaaaagtcattaacagaaatttgttaatgacttttggtttctataaaaaaccgctctaatccttcttcccaagacggcatttgtgaaaaaccatttaatcgtagcatgttatgttgaaaaatagaatatttgggcctcgcagccgcagccccgaattcttccgttgaaacaggtaatacattcactttcatattggcgtacgaaaatatcttttgtgcaaattcaaaccaagagcatgagcctctgtttgatacgtggtatgtaccgtataaagaagtatgaatgagcttattaataaccatatttaaatccgccacatacgtaggagagccaacttgatccgctacaacagatatttcatttctttcttttcctaatcgcatcatcgttttgacaaaattatttccatatttaccatatagccacgatgtgcgaacgataaaatatttattatgtaactctttgacaaactgctcccccgcatacttagaggccccatatatatttatcggcgctggactatgaaattcgtcgtatccatctggtctggcgccttgaaatacataatcagtactaatataaactagcttcgctcctactaattgtgaagcaaccgctacatttcgagctccgattgcatttattctatatgcaaggtcctgttctttctccgcatgatctactttcgtataagcagcacaatgaataattatatgtggttttatttcttgtaccacttgttgtattcgggatatatttgtcacatctaataactttttatcaaatggatatatatcatattcttcagagtctaactcttcaaatagttgctttcctaattgaccgtttgctcctgttatgataaccctctctttcatttaacatgccccttactggtcttttagtggtttccaccattccttattcttttcataccatttcaccgtctcttgtaatccttgttcaaacgtatatttcggttcccaatcaaattcattcttcattttctctgcatcaatcgcataacgacgatcgtgccctaaacgatctgtaacatattcaatgtctttttttgtttttcctaaaagattaataatttgttccacaacttctacatttgttttttcattatttccacctatattatatacttctcctacacgccccttatgcagaacaacgtcaatcgcactgcaatgatccgttacatgtaaccaatctcttacatttaatccatcgccatataacggtaatttttttccttccagtgcattcgtaaccattaacggaattaatttttcaggatattgatacggcccgtagttattggaacaacgcgttactataactggtaattgatatgttttatagtaagatagagctatcatgtccgcactcgccttacttgaagaatatggactatttggagctaacggtgttttctctgtaaacttccctgtttttcctaaagagccatacacttcatccgttgacacttgcacaagttttatatgcgaatattttttaactagttctaataaagtgaccgttccaattacatttgtatcataaaaaggaatcggattttcaatactacggtccacatgtgattcagctgcaaaatttacaatcacttgtacatcccgctcttttataacgtgttctaatagctctccattttgaatttctccctttacaaaagagtaattcgggtgatccagaagagattttacgttatttaaattcccgctatatgttaaggcatcgtaattaataattttatatgtttcataactttgtagcatgtaatgaacgaaattacttccaataaatccagccccacctgttactaatatattcataaacaacgctcctacttaaaaactatcttcatattcctctaataatggtaatatctgatccttatcggacaatataggatcggttactggccaaggaattgctaaatctttatcttcccaaagtaatcctgagtcatgctctgcgctataatattcatctactttatacataacgatagtatgcggaacaagcgtgcaaaatccatgcgcaaacccttttggcactagtaattgccgatggttatctgcacttaaaatatatcctttccattgtttaaatgttggtgatttttttcgtaaatcaacgataacatcataaattgccccttgcataacttgaatgagtttcgtttgtgctttcggttttttttgaaagtgtagtccccgaatcgttcctgccttagccgaataagatacgttatcctgtacaaatgaatacgttatccctaatgtttctagcacctgcttattataactctctgaaaaaaagccacgctcgtctccaaacaacctcggttctaacaattttgcatcggtaaaatttgtttctacaactttcatattctcacctattctccgttaaactgtttcccaaaattaatatcacgcgctaacgtattcgccttttgaagcgaagcatgagttcccgcatcagtccaccagccgctcatttcattataagtaagtacccctcgttttaaataccaattatttatatctgtaatttcaagttctccccgtgcagaaggttttaattctttaatataagaaaagactttcgaatcatacaaataaattcccgtaaccgcataagaacttttcggctctttcggcttttcttcaatttcaactatttttcggttttgaatatgtgctacgccaaatctttcgggatcttctacagattgcaatagcactttcgcaccttctttttgatttgcaaactcttcaacatacggaagaatatcatctgaaaaaatattatcccctaatataactaccatacgatcattcccgacgaaatcttcacaaagccctaacgcctgtgcgatcccgcccgctttatcttgcacacgatacgtaaaggacactccaaattcatgaccactccctaaaaagctaacaacatcccccatatgctctttacccgtaataatcataatatctgtaatatcgcattgttttagcttatataccgcatgataaatcatcggataccgaccaacaggaagtaaatgtttattcgttactttcgttattggatataatctcgatccagtaccacctgctaaaataattcctttcacttttcatctctcctttatgatggagataatatatctttgtaatgttctacaaacactttccggtacttctcatatgtatccgcatcaaactcatccccgttgtaatgaatacaccataaatttgcttgatttgggataccaattaaataaccagccctttgaaactctaaagactgtgacacatcataaaagtgaaacccttgaaacaaatcttctcgccacggaatatcatactgcgttgccatgaataaaccatcaattgcctgaactgacaaaaatggttgattaccataaaaaacctgatctaaatttaataattgataattccgtcttctatactcaatcactttccctactaaattttttccttcccaccatatcccgttattcggtaaaaactgagccccagcgactcctattaaaccaagcttttcattttctttaaaaagagatataagtgtagaaaacacgtctcgattaataagatatgtatcttgatgtatatacactttgtatttcgctggatatgaaagggctcggttgtatgcacttgccatactttgcgcatctcgtatcggaaaaatttgcacgacataaccagagggaacaaaaatgtttcttatttggctctcacattgtttgaaaagctcctcattatttacacaaacaacgactaatattgtatgatctttcatttttgtccccccttttattcttccttatttacatctgacatatagtgttccacaaatattttccgatacttttcatagttcgtcatattcacatcaaaatgataatggatacaccaagcatcgcgctgtacaggtacaccgactgtatatcctgcttttttaaattcaaatgattgagatacatcataaaaatcaaatccgtcaaataagtcttctcgccacggaacatcatattgtgtcgccattaataaaccatcaatacattctacaggaataaatgtttttgattcatgatacggttgttctaaacttgccatataaaacaaatcattcatataaccaatgacttttcctacaattccacgcccttcgttccatacgccagtcggaggaacatattgcgctccaaccatcccaatcatcccaaggttttcatgttcctcaaataattgaagtaatccgtataaaaaagccctatttataataaaaacatcttgatgtaaatacactttatacttcgctggatgcgaaatggcttgattgtatccactcgtcatacttttcgcatttcgaatcggcataaattggacaatataccctggcggtactaacaattgcaatatatgtcgcacgcagtttgcatacaatttccgatcatttatgcatgtaacaaataatattgttttgtctgcagcactcataattgtgatttttcagcttcaataatatactgaaatacaactgtctcagccatgaagccacttccaagacgatattttttacaaattccatataactcctcaataagcggctcatacattttatgatcaacatatacacgatctactttactaattgaatatcctgcttttaaaaacattcttagcatttcattgaatgtaaagaaacgaatatgtgttttatctaataaaccatattctgtatacgtccaatttccagcaagtaagggagctaatactgaaatatgagcaacgtttggtatacttgctaaaatcacaccattttgctttatatatggcttaaccttttcaatcacagcccacggatcaaataaatgctctaatacatccccaaataggacgcaatcaaattgcccctcctcataaggaagatctattttttctatatcccctaaaataacatgatctagtctttccttcgctttttctgccgcctctggaaatgcctctattcctgatacacgtgtaccgttttctttaatagctgctcccaatgcaccgctcgagcaaccaatatcaagaacttctttccattccttttttatatgctttaataaattcggattcgctgcattataataatgctcggatttttcttcatataaagaacttttttcgcgattcatttcacacactccttatgcaaattgaattagaaatataaatctcatatgaattctataaagtgcagattttgttcatcccccaatgattattagcccgcaaatagcagtataaaatcttttatttatattggttacgttactgatactctaatatataaccaatctattagagttagaatagcgataaatcatttctaaaaaacgaaacctattacactttatatggtttatcaaaaactccccgaaaatatttacggttatattcaattgcagcattattcggaacataagaagctgctaattcattgtaataatacgctttatcctgctcccctaacctgctataacaaatacacatttgtaaatagggtagccatgtgtagctagctggactatggaaaggactttccgttgccattggtacttccgtggcaagtttaaaccaaaatatcgcttcattatatttttcttgttccatatatatatatcctattcttgtacaattctctcctctagggacgtcataccgaaacgacttcacacaagattcgattgccttctcccacattcctagctttgcatagcaatctcctaacttaccacatgcataaattttctcttcataccatccttcgtcttgattaagaaatgtttcatatagaagaactgcatcatcatatttttggttatccgtagattcatttgcgtaataaaataaatctctcggacttaattcttcacctgccgctacagtattttgaaaaattttcaaattacgatttgttacttttttttcttttttatgtgtaatagcaacattactactaaaaacctcaccagaaatagctaaatactcatgaacctttccaaaccattgaaattgtttttcacgctttacaagtcgatttctttttgtacaatataaaggtttcccgttagaatccattgcaagatgataaggcatcgaaacagcatcaattttaggatctaattctctttttaaaagtttcaatgcttcttgagcatcttctaataagacatcatctgcatctagccacaatatatactcttgcgtcgcttttgaaaaagaaaaatttcttgctgctgcaaaatcatcaatccactggaaatcatatatgttagaagtgtatttctctacgatttctttcgttcgatcgacggaacctgtatcaactactataatttcatccacaattttttcaactgtttctaaacaacgggctattgtctcctcctcatctcgaacaatcatacataaactaattgtaattccttgcttgttcaacataatcaccctcttccaaatcaatcatatgttatacatatactaaactttccatttttttaaattgttcaagtagtttaagatttcttttcaataattcaaatgtccgtgtcattttctttcggttttgcatctactatataatgaacgctttatggaggtgaatttatgtcaaataataattattcaaatggattaaatcccgatgaatctttatcagctagtgcatttgaccctaatcttgtaggacctacattaccaccgataccaccgtttacccttccgactgggccgaccgggccgactggaccgactggacctacggggccgactgtacctaccgggccaactggaccgactgggccaactggacctacgggacctacaggacctacaggaccgactggtggcactgggactactggacctacggggcctactggtggcactgggactactggacctacggggcctactggtggcactgggactactggacctacggggccgactggtgacactggggctactggacctacagggccgactggtgacactggggctactggacctacggggccgactggggctactggggctactggaccgactggaccgactggaccatctggactagggcttccagcaggattgtatgcatttaactccgctgggatttctttggatattggacttaatgctccagtaccatttaatactgttggatctcagtttggtacagcaatttctcaattagatcctgatactttcgtaattagtcaaactggattctataaaattaccgttatcgtatacactgcagcagtaagtctattaggaggacttacaatccaagtaaatggggtatctgttccaggtactggggccactttaatctcagttggagcacctatcgttgttcaagcaattacgcaaattacgacaactccatcattaattgaagtaatcgttacagggcttgggctatcattagctgttggtacaaatgcatctattattattgaaaaaatcgcttaaatttttacttagcagtaaaactgatatcagttttactgctttttcaatttcaaattcaatcatgaaacattcgctatctacataatcatattgttgtatgacattttgcaggaggcacaaatatggaaagtaaatctgctgttcagctttatctcgaattgctaaagaagaccattttatttgaaatatggttagaatatgaggcatacttacccgcatctctacatatttcaaaagaactagaattcgagccagttacagtccccctccctttattcattaagcaatatgctgaaaaccataacttaaaaattgtaaaaccaaatgtttcaaaaagtgaacgccatgatggaatggattggccaagagcagcacatagcatgatcggtcgagaacgtatgaaccaattacaagaggcaatggaaaccgttgttcgtgaaaatatagagggagattttattgaaacaggtgtatggcgcggaggatcgtgcatttttatgaatggttttttacaagcaaacaacattacgaatcgtaatgtgtgggtcgctgattcatttgaaggtttgccagcaccgaatctagaacaatatccaaaagattacggtgattatttgcacacattcgattatttacgcgtctctttagaacaagtacaagagaatttcaaaaaatatgatttactaaatgatcaagtgaaatttttaaaaggctggtttaaagatactttaccaacagcaccaattgaaaaaatagcaattgcacggcttgatggtgatatgtacgaatccacaatggatggtctcgtgaacttatatgataaagtttctaaaggtggctatataattatcgatgactacgggctaccgccatgcgctgaggctgtgacagactttagaaaccaacgaaatttaaaagcccctattactaaaattgatgtatttggcgtttattggagaaaagaataaaaaagatttaatctataggagatttcattttcactcatccttctctcacttctaatccaattaagtattctttttcggaatctccttacatataacaattgttttcctgtgttctctcaatacaaattgaaaattttattaatagatttactgcatcttctcatacaagaaaggggtatactcatgagtgaacttaacaaagaaatgactttactcccccctcctgaactcgtccaatatgtaggtggcgacttcaaaaaagttggaaaagagttcctaaagcattttattcaaattggcgctttaaaaccaaatgaaaaagtattagatgtaggctgcggcgtcggtcgaatggctgtaccattattgaattacttaaatgatgatggagcgtattatggatttgatttgtttaaagatggaattacttggtgccaaaataacatttcaactatgcgtaataattttcactttgaacatgttgacatatacaatcaattctataatccagaaggaaaagaagatgcctctcaatatcgtttcccctatgaagacgggacattcgattttatctttttaacttctgtatttacgcatcttctcccaaaagaattagaacattacgtatctgaaattgtacgtgtattaaaaaaagacgggagatgtttcattacattctttcttataaatcctgaatcgtcctattatttaaatgcaggacaaagtacattaggtttttatcatcgaatcgaaaattgctacgttgtaaataaagatattccgaatttcgcagttgcttatcctgagacagatatttgcaatctattgaataagtacggcctagaaataatcaataagccgcattacggtttatggtgcggcagacatgaatatacaagttaccaagatattgttcttacaaaaaaaagcttctgaaaggaagttatgtatgatgaatgaaaaaaatccacctctcgtttccatccttattcccacttataatcggcctcattatttcaaaattgctctagaaagtgcattggcacaaacttattctaatattgaaatcatcatcggagatgatagtacaaatgatgaaacagcaactttaatacgcgaacaatacttaccaaattataaaaatataacatacattcgaaatattcctactctaggacaatttcacaatgaccttatgctcatagaaaaatcaaatggtgagtatataaattttttaatggacgatgacgtgttttataagcataaaatacaaaaaatgatgacctattttgagcaagatcccaataaaaatcttgctcttgttacttcttatcgagtacgcattgatgatcatggaaatctaataggtgattcccatccaacacaaaggttatatagtgaagacaccccattaaacgggatatttttaggtaattggatgttaaaaggtggacacaacattatcggtgagcctacaactaccttgttccgaaaggaattgctcactgaaccttttggcactcttaaagagcgacaatattcttgtagtgttgatatggcctcatggatttctttactttctaaaggaaatgcaatatacatttctgagcctttaagtcaatttcgctaccatgctggacaacaaatacacaataagctccttcaaggttgtgaagatttcacacacctcgttataacagcaaaagaatatggctttttacaaaatactacagactatagagcagctctacttagtgcttaccaatggtgtaaaagttccttaaaatactatcttcatcaactagatatttttcctgacgcacatgtacgtctttcccattgtttggatataattattaaagagttaaacaattaaactactctgcaaaattaaaagtgtatggactatatgtgaatcattcgtatagttcatacattctttctcatactataaagtgaaactttaatcagctctcaccaatcgggcttttacgggcagttgatcccccacctaacttcttcgctttcgctgaattttgaggtaggggtcttactgcccattaatgcgggataaaatccattactataaagagcagtagaaaggaatacctacattgaaagatccaaattctcaatatcaaatagactacgtattactatttattttatttgccattgggattgttagttgttgtgctattgcaagtgcgcaagcctctttaccgccatttttacaaaacgtcaattttgtactaaagcaaatccaatggtatttcattggatttatagccattggtgttattatgattatcgacttcgatcgttatcaaaaaattgcttggtatttgtacagctttgcaatggtactacttattggactagaacttcaagtaccaggtgccgttacaattaaaggcgctaccgcttggtacaggctcccaggcatcggaaattttcagccttctgaaattatgaaattatttttaattatcgtcattggacgaattatagcaaaccataatgagaaatatttttcccaaacaatacatgacgattttttactacttggaaaaatatttgcaacaagtttgccaccactactactcatcgcaaaggaaccagatttaggaaatacaatggtcatttcagcgatgcttgcagcaatgatactagtttctggcatacgatggcgttttattttcggattagtttcagctactttcgttgctggaactacattaatatatattttttttactcacacagatttctttaaagcacacattttaaaagaatatcaattaaatcgcttctacggatggttagcaccttacaaatatgatgcacaaggctatcaattaagacaagcattcttagcgactggatccggagaaatgcaaggaaaagggtgggaaaatggacaagtatattttccagaaccacatacagattttattttcactaatgtcgctgaacaatttggatttctaggcgcaagtgtcattatttctctttttttcttactcatttttcgaatgattcatattgctttagaaagtaatgatcctttcggtagttacatttgcgctggtacaatcggaatgtttactttccaagtattccaaaatatcgggatgacaatcggattacttcccattacagggataacattacctcttatgagctacggaggaagttcactgcttacatacatgattgcgattggattcattttaaatgttcgctcaagaacgaaaatctttatgtttaaatgaacaacacaaaaacgctatatttttatctctatccttttttagatatactaatgaaaaatacgatggaggtttaaatatgaaatatgacattataggagatattcatggatgcttccaagagtttcaaaatttaacagagaagctaggatataactggagtagcggtctaccggttcaccctgaccaacgtaaacttgcattcgttggcgatattacagaccgtggtcctcattcattacgtatgattgaaattgtatgggaacttgtcatacataaaaaagaagcttattacgctcctggaaatcactgtaataaactatatcgatttttccttgggcgtaatgtaacagtcgctcacggacttgaaacaactgttgctgaatatgaggcacttcctcctaataagcaaaacattataaaagaaaagtttatcactctttatgaacaatcaccgctctaccacatactagatgaaaaaagagtaatcgtatgtcacgctgggattcggcaagattacataggaagacgagataaaaaagtacaaacctttgtattatatggcgatattacaggagaaaagcatgccgatggctcacctgtccgtcgcgattgggcgcaagaatacaaggggcaagcttggattgtatatggacatacaccagtaacagaacctcgattcgtcaatcagacagtcaatattgatactggtgctgtatttggtggcaaattaaccggattacgttatcctgaaatggagactatctctgtcccttcttctttaccttttgtcgctgagaaattccgtccaatttcataactaccttacttagcattatttaggcagatctcatataaaactaggtaaagtaattaaaaaaagatgcaataaagtgcatctttttttaattacactacatataatgtcgcaggaggtgacagaatgaagaaaaaatcttctaaacaaaaaagaaaatttccccctttatatctgcccatgtacggaattaacaactggtgtagtattcgggctgcagcgatagaagaactggaagaacaagagtcatcaaaaaaaagcaaagtaaaaccaacatatgtctctttagaaaatgctgtgatgagccgcataatcgatcgcagaaaaataaagatgcaacaaaaaaataaacagctctcaaatcaagatgaacaggtaatacattctaatcaagcagaagaaaagacggaagaaaatatttctgtagcaataaataaaaaagtggaaccagaaattccagctgctattataaacaaagtaaaaaaaataaaagaggcattggcttcatcgaatgatatacaaactgaaaaacccctcataattgagacacctacacctgaaaatacaaaagttaaaaggggcggccgatatgcatatgcagaggggcttcactctcatgcggagggcatggcagcacatgcggaaggcttattaacacacgcaaaaggttctttctctcatgcagaaggatcaaactcaaaagcaactggacatagttcgcatagtgagggaagtgaaacgacagcaggcggggcttattctcatgcggagggtaaacagacaattgctttaggcgaagcagcacacgcagaaggaaacgcaactatcgctaacggatcctcttctcatgcggaaggtcatcatacatcaacagctcattttgcaggtagccatattatggggcgcttcggcattgcagaagaagcttattcttggtttattgcaaatggtgtaagcgacaccgaccataatatcggggctaaatggcttgctcataatggagaaatgtacattgagggcgcgtcttacaatgcaagcggaacggattttgcacaaatgtttgaaaccgaaggttataaacctattgatgtcggttatttcgttacatttagtaacgaagaaaaaattcggatagctacttcacgcgattcgttcattttaggaatatctagtgcaacccctgcccttataggaaatagcggggctttaagttggcaaaaacgttataaaacagataactttggaaaacgccaatatgtatggacggaagccgaagaaatacaacctcttttaaatacagaatgggatccaacttgcaaatatgtagcaagaaaagatcgcgccgagtggcttcctgtcggattaattggacaaatgttagtacgtgatgacggcacttgcgaagcacatggatattgtcgtccaaatgacaatggcattgctacaaaagccgaaagtggatttttcgttataaagcgtacgggtgaaaaccaaattttaatattattccgctaagaaaaaagggaacaaaattctttataatataagaattttgtcccctttttaagtatgccgcaacacttcttgcatatcgcttggaagctttatagtgaaagacatctctttctctaaaataggatgataaaacgtcaaagatttactatgaagtgcttgccgtttcatttcatcccttctccctccatataagctatcaccaagtaacggatgtcctatatgagccatatgcacacgaatttgatgcgttcttcctgtctcaagctcaagcgctacatgtgtcttatgatatgtactatcaattaccttaaaatgagtaactgccctttgtccatcctcacaaaccgttcgctcaataatgctatcagattttcgaccaattggtgcatcaatcattccttctcgttctacaatctttccgtgaacaattgcttcatacgttcgtttcacagctttttgttgatgctgcttcgataaaagatgatgcacgaaacgattttttgcaataagcataagccccgaagtatcacgatctaaacgtgttacgatgtgcactgtacttgcaaggtgctgcttatcataatgagataaaagcgcattggcaacactccttgtcggatgttctctagacggaatcgttgacatgttcgcctctttattaatgataagaaccgcgtcatcttcatatacaatgcttaaagggatatcttctgccatcatcccttcacttctttcctcaactggaaaaaagacacgtaattcttcaccagcacgcaactgatgacgaacactcgcatgttgaccatttacttcaattgccccgccgtgaaactttatatccgttaaagcggctttagaaatacatttcgttttcaaaaattccctaactaaagttccctcttcagccggacctatatcccatttcaatgtaaatctgttcaaatatataaccctttctatttatccgcaacaaacgagtcacgaactcgtttccagaacgggaatggacggaaacgaacaaatcgtactttctcgtttgcgacccgatactggattgatttcacatcttgatgaaccatcgttaaatgatccactgtaatttgtaagttcattcctgcagctggctttaacacacatgtatgatgcttcggcaatacgagcggcgatcctacagtacgaaatacacgattgttaatggacgccatttctgcaatttgtatcgcttcaatagatgggtgaataatcgctccgccaagcgctttattatacgcggtacttcctgaaggagtagagatacataggccgtctccgcggaatgtttcaaaatattctccgcgtatttctacttctgttactaatgtaccttctgcactttttacagtcgcctcattcatcgctaaatactgtgactctttacttccattcacatagcgaataataacttctaaaagcggatattccaccacttggaatggtgttttcgcaattgcaattactaatttctctacttctgtcggtaaccaatctgcatagaaacctagatgtcctgtatgtacaccaacaaatgctgtttcatccaatcgattataataacgatgaaacgcatataaaagcgttccatctcccccaacagaaattacaatatcgggttccttttcatccattataaatccaaaatctagcaagtactctttcatcgtgcttgccagtgtatctgatgattgatctccctttgacataattgtaaatttcatcgcccaacaccctttagtttatgattcagaatctttcgtttcttgctttcttgaaaaagccttttgcgcttcttgaatttcaagacgaatagaagacatttcttcatctaataaaaacgccgcttcagctgcacgttgcaaccttattttaatatcttcaggaaaacgtccactatatttataatttaaagaatgctcaattgttgcccaaaagttcattgctagcgtgcgtatttggatttctaccaatactttttgttcaccctgaatcgtttgaacaggataactaatgacaacatgataagaacgataaccactatctttcttttgcgtaacataatcacgttcttccacgatttcaaagtcatttcgttttcgaagatattctacaacaggcttaatctcatcaacaaattgacacatcattctaagcccagcaatatcctgcatatcttctctcaatcggtctagcggtacatttctcttctccgctttatcaataatacttgcaaccgactttacccttcctgttacaaactcaattggagaatgctctgttaacattgcaaattgagtacgcattccttttagtttcactttcagctctgccaccgcttggtggtaaggtgctaaaaattcttcccaatttcgattcatttcaaccaccaccaaaatcaatccatttgcttatagaaatactttttctacagcagttactagttcttctccgtaatttgcattaccttcaatattttcaactaaatattctacttcttcttttaatccttctaattccatttcaatgtcattcacgcgaacgaacataaccacatcgctattcatcgcttcatgcattgcttcccagcatgtgtgcggaatacttacataaatgaaagatgattcattttctaagatatataaaaatgataaattgtctgagtctacaagtacgtgattacgcgcacttaactcctttacctctatttcactattttccgcacaaaaaataagagcattctctctcttttctacgctcttaacttggattttattttgcatgctctaactcctccatctcaacttcctgtcttacttaacagtattattgtatcataacatggacgcaaacaaataaaacattgaaccaaatttatgaaaaagcgataatgtgtaaagaattatttttcaaaaggagattatacaatgacacaagaaattgaaattgaattcaaaaatatcgttacaaaagaagaattcgatacattatgtaaatcgttttctattgaagcatttacaaaacaagtgaatcactactttgaaacacctgacttctcgttaaaagaagctggctctgcacttcgtattcgtcataaaggaaaaacttatacgttaacgttgaaacaacctgcagaaattggtttattagaaacgcatcaagtcgtaacagaagacgaagcaaaaatgatgatggaaacaaacacaatcattcaaggagcagtagtagatcaattacacaaattacaaattcctgtttctgctttaacatatatgggtagtttaacaacagaaagagcagaaacattatttaaaggcggaacgcttgtctttgatcatagtttctattacaatcacgatgattatgaaattgaatttgaagtgcaagatgaagaaacaggaaaagctgcatttattgatttattaacgcaacataacatacccgttcgccatacaaataacaaagtaaaacgctttttccttgccaaacaaaacaaagcacgctaaagtgaaaattccactagtgaatatgtttcactagtggatacatctcactaaaaaaggttacacccgtagaataagcaaagaatctttgagaaggctgtttatttgccctctcgaacattccattgctacaatagatatacatttcatggaaaaaggagtttataaaggatgagcaagcaaccgatgacaccatttgaagcaattggcggtgaacaatgcattgcaatattagtagatacattttattcctatgtcagtaaacaccctgacttatctcccatcttcccggaagatttaacagaaaccgctaggaagcagaagcaatttttaacccaatatttaggtggtcctaatttgtacactgaagaacatggtcatcctatgttaagagcacgccatctcccgtttgagattaccccaaaacgagcagaggcttggctatcatgtatggagcaagcaatggatgatactggagtgcatggtcatataagagagtttgtttttgaacgtttagcattaaccgctcagcatatggttaatactccaaacgaaacaggtgaagtgtaatggataagcaggaagcaaagcatataaatatgccatctccttccgcatgcgagcataagtctgtagaagcatatttatttattgatccactttgtaaagattgctgggaaattgagccttttattattaaactatggcttgaatacgggaaatacttctctattcgtcatatcgtaacagggaaagtggatggaacgaacgcttcctcacacaaatggaataaacctgctaatattcgatttgtgtgggaaaagacaaccagtttacaaggtttttcatgtgatggaaaggtacatatgcaagaagcatcgtcaacaccatatttagtttcgatggcaattaaggcagcggagttgcaaggccgaaaagcaggttcgaagtttttgcgaaaactccaagaatacattttccttgaaaatgtatcaaaccctgattgcgaactattacttgcatgtgcgagagatagcaatattgatgtagaagaatttaaaaaagatctacattctgctagtgcaaaaaaagctttccaatgtgacttgaaattcacgaatgaaatgcatattacagaaataccttccctcgtcttttttcatgcgaactcagatgaagaaggtattaaaatcgctggaaattattcctacgatgtatacgtacaattattgaaagaacttgtaaaatgtgaaattgagccagaaccattaccacctttagaagtgctactagaagcaacacaatttatatcttcaaaagaagtagcatttatttatgactgtccgcagcaagaaattgagcgcgaactaaaaaaattacaactgaaacgaaaagtacaaatgattgaagtaaaatgcgaacgttattggaaatggatagcaaaagaaaaagacctggtgtaaacaccaggtctttttctttacggcttataaaaatattaaaggggatgggagaaattttcacgttcaaacaaaggggtatatgtttgtatgtgaattcgttcacgcttattatattacaagattcgacgtcagatgacaaccccttttgtcgaatttcacacttttgtcacattctaaacgttttcatttttgaataagctataaaaaaggtcatttagggggtttatttatgaaaaaatcttatattgctcttctctttctagctgtcatcgtttcttttttcttgtacatcctctctctactacaagcttttcctaaaattattgccttacctcttttattcggaatcatcgttatcacactctcttatttcaattataaaaaacgattcaaagggttttaagttcaaaaatcagccgtaaagctatcctttcagttagaaaaaataaagaaattcatctttttttcaacaaatatcgacattaaatctattcaacaaaaaagacgaggatacaatccctcgtcttttttcattacttttcttcaaataataatgcttctaattcatttaatttctcttcaaatacttgtagtgcctcttttactggttcaggagatgccatatctactcctgcttttttcagcacttcaattggataatcagagcttcctgcttttaagaactcgttaatataacgttctactgctggttgtccttcttctaaaatctgtttagatagagctgtcgctgcactaaatcctgttgcgtattgatatacgtaatagttgtagtagaagtgtggaatacgagaccattctaaaccaatctcttcatcgattactaaagcgtcaccgaaatatttcttatttaaatcgtagtaaatttccgttagcatgtctggcgtaacagcatgtccttcttgtactttcttatgaataatatgttcaaactctgcaaacatcgtttgacggaatacagtaccacggaacccttctaaataatgatttaataaatatagacgctctttcttatcttctgtcgtttttaataaataatcatttagaagcgcttcattacaagtagatgccacttctgctacgaagatggaataatcaccatatacgtgcggttgtgtttttcttgtatagtaactatgcaccgaatgaccaaactcatgagcaagtgtaaataaattatttacattatcatgccagttcattaaaatatacggatttgttccatatgcaccagatgaatatgccccgcttcgttttcctttattctcatacacatctacccagcgattttcatatgcctctttcaaaatatcaacatattcatcaccaagtacgtttaaagattttaataaaaggtcttgcgcttcttcgtatttcacattcattttcacttctggtacaagtggtgtatataaatcatacatatgaagctcatcaagtcctagtgcacgcttacgaatatcgatgtaacggtgtaataaatgtaagttgtcatttactgtttcaacgagttgatcgtatactgcttccggaatattattattgctcaatgcagcttggcgagcagaatcatatttacgaacacgcgcattgaaattattacgttttactgctccacttaacgtacttgcgaatgtgtttttaaattttccgtacgtttcatatacagctttaaatgcatctttgcgaacacgaggatcatcactttctaaaaactgaatgtaacggccatgtgtaatttctatttcttctccgtcttcccctttaatagatgggaattttaaatccgcgttattcaacataccgaatgtattgcttgatgaactcattacttcagatgcttccgctaataaagcttcctcagcttctgataatacgtgcgggcgttgacgtgtaatttcttctaatgcatgttcatatacacttaaatctctattttccttcaagaatgtttgcagtgtatcttctgaaatcgataaaatttcaggaacaatatacgctgtgctactagatacttgtgaatataaatttgttgcgcgatcatttaatgcttgatatacagagtttgttgtatcttgatcgtaacgcatatgagcatatgtatataacttacctaatcgcattgaaatttcatcttcatattgcaatgcctcaagtaaattgtccgcagagtcaccaagtttccctttaaattcagttaacttcggcaatagctctttaatagcttgaaattctttttcccattctgcatccgtttggaaaatatcttctaatcgccacgtacttgcttcttcaatctcgttgcgatctggtaatgctttcgctttgttttgttcagacattctttaagccctcctttaaatatctctacttaagtacaattcgtttttttcttatgtaattccttcacaatcattctttattatatccccttttcctcctctcatgttaaaatttgcctcaaataaagatagcgcatgtattaagcaaatctcatcatgttttataatctcctcctctgtttttaacatcatgacatcccttattttccggtacgtataagttcccactttacgcaaaacacctatatagcataaaaatgtcatatattcagtaactgccactttccatatatgctttgaaaagtacggaagtatccgccttttcgtatacctttttacataactacacacgtattgaagagaaatacactctcccactgcaagcttccctatacacttcatatatagaaaagcttgccatataaatgggtttgtttgtaaagcaaatgcagaagggagtggaacaccaatttcagaaggaaagcttgctggggtacatttaaattgatataagaggcgtaataatgacttataattataattccaaatcggcagggcatttttgcggaagtagttctttctcttcttccactcttcacccaatctttctttcccgaaaggaacgggagaaaaaagcatttcaaaagtagtcgtatcagttggtaaatatatagtatgtgagaaaaagacatttgtagaaaagggagtgacaaatgcacatttcataaatgatttttgtttcggacagaagaaaataagaagtggctgaggataagattgtaaggagaaagccataagtgaggaaaatttcatccaatatgcagattgctttttcaattgatttccaccaacgatccaaatgacctgtataccagcttgccaatacgaatatgttcttttgtacagctgctctatagcgaggtttgcacattggtattcaattgcaatttttctgcccgccctctctacaaaaacatctggtcgttgcttaatttctggaaggtagtactctatatccacctgaaagttttgacgcttgaaccatctatataacaattctttaccgtgcatatgatacgttgattccgcttcataaaaggcaagacatgaatccacttttttatgagcaaaatgccaacttttttgtttccctaatttcatttgcacttcctttccacaagctacacaaaagaatcgttcttgttgacgcatacggcgcaaaagcttttcattacaattatagagtaaatgaattttctctccgttttctcttttagcgataaatatcgtaatcacaccctttcagctccttatattctacaatttgttacaaattccttttaaaaaagagatatcccaatttcggacatctctttttataataaaggtgataataagcggtatgttgattcaacaattcgtctatgaagacgtcttttatgaaaatgatcaacatgaatttcacttgattcttctaaatcatctttaaagtcttgaacaagttttcgaatgctatctgtatcatataaaaaggcatttacttcaaaattcaaatgaaaacttctcatatccatattagctgtcccaattgaagctaaatcagaatcgacgatgacaactttactatgaagaaaacctttttcatattcatatatctttacacctgcatctaaaagctctgggaagtaagatctcgatgcgtaaaagacagtacgcttatccggtttactcggcattaataaacgaacatcaataccagcaagtgcagcaacctttaatgcggataaaatatcatcatccggaataaaatacggcgttgcaatccaaatggatttccgagcagaagcaatcatggcaaaatataaatgcttaatcgtttcccatttattatcaggcccacctgcaacaagctgcacgcctccccaatgctccccctcaactgctttcgcttgtaaatattcaggggctagcacagcctcaccagtcatataaaaccaatcttgaaggaaaataagctgcaaactttgtacagcttcaccacgcaaatataaatgtgtgtctcgccaaaagccgaagtacttatccttccctaaatattcatcaccaatatttaatccacctacaaagccttcttttccatcaataataacgatttttcgatgatttcgataattaattttatcgtttaaaatcggaaagcgtacagggaagaacggaatcatttcgactcctgcatcgtttaattcttcaatatacgattttgataatttaaaacttccaaccgcatcatacaaaaaacgaacgactacgccctcttttgatttttgtattaaaatatctttaatttccgttccaagcttatcatcacgcacaatgtaatattccatatgaatgtgatgtttcgctcgttttaatccatctaaaatggcctgaaacgtttcatctccatttgttaatgttctcgtttcagtttgaaatgaaatatttaaagcgcctaagcgatccgctaaacgaaataacagctcttgatgcttatgattgcgtaaaatccgttcttcgtaatcttcatgccccttatattgtaaaaacgcttgttcatcgagcaacgccttcttttggaacattctcttcctccgaaagttctgtccgaataataaataagcgaagaatccaaataccggaaaaatacctaacacaatgagccatgtaagtgtttttgacggatgacggttctctaagaaaataacgcaaccaattaaaaacgcagatactgtaaataaaatactaataatacctaaaaccgaaacatcttttatcccaatcacatctgaataaaatgctacatcaataaacatacgtaacgaaacaaataatgcgaacaatagcagtataaagaaaatcagctttaacgtatttttcatctcttacctcctaactaagaaagctttcctattcttcatataaaaagccgatttcatactacagaaatcggcctacgttttagcaggaaaattattgcgaatcgtttcaagcgcatgctctttcacaatttgttttccatactcacttacacgatgaattgttaaagttgattcttctccatattctaaaataatacttaaaatacgatcgatttcttcttcatcatgtagcacttcatcgaattccacatatacataatagcggttctcaaatgaatacagctcatcttttatatcttcaaagataagacgatgacttaatgaaatgacatcttcaaaatcattaaacttaattaaaaagccaaacgtaccatcttcattaaagtttgttcctgtttgttcttctacctcttcgactaattcttgctggaataatgattcgatgccttcatctagaggaatatctataattttgtctacccctatcggtagttccagcttttgcccgtcctttgaaagctctgctttcgtgacaagtacttcaatccctttatcgactgcttgcacttgaatccataacggcccatcaataaagaaatcgtcatgatcacgagcttcgtccatcatctcccaaaagagctcttcacttcgttcgcgatcataccaaatctcttcacgattaaatcctctatcctctatatcaatgtacgtaataaaaaatttcatcgtatgatcattaattctttcaatatccaaaatacaactctcccttcctgcttagaattgttatgaagggattccccactcatatgacaaatcaatagattcttgtactctcattttatgataagattctccagaatggaaataaaatcgatttattttacaaaaatagttatatgcctatctttactcgatcaactacgtaaatatattattatagcgatttcttacttacaaaaaatttggacatacatttccacattcccccgtacactgtaataaagtgaaacttctattagaagagattatttaacaacaactttcttcatcacatacatatagttcgcttattaaaacatcataaatggaggcagacgaatggacttagagtttttaacatccgtactaatgattgtcggtatcgatgttgtattaggtggtgacaatgcaatcgtcatcgcactagctagccgaaatttacctgaatcgaaacgaaataaggctattttgatcggtactcttttagcgattgtactaagaattgtccttactatactagctgtctatttactcgacattccatttctacaattgattggcggggttttacttacattaattgcagtcaatttattaaccgataatagcaacgatctttcttctattcaaggaaaaacaactttatttcaagctgtgcggacaattgttttcgcggatctcgttatggggtttgataatgttattgccattgcaggtgcagctcacgggagatttttactcgtcataatcggcttactcatttctatcccgattattatttggggcagcaaacttattttaatacttatggagcgatttccattcctcatttattgcggtgcagcaattcttgcctatactgcaggaaaaatggttacacatgaagacagacttgcaaccttttttcataacaatccaagtttcactgcaagcattccttatttgttcattttcactattttatgcatcggctttattgtacaacaagttcgattacgcaatgtgaaacattaaaaaaaaccttctactatataataggtagaaggttttcatattattataattaatttacaagacgttgtgcttcacgtaattggaacgttcttactgtacgtggtaagaaacgacgaatttcgtcttcgttgtaaccaacttgaaggcgtttctcgtcaatcataattggacgacgtaaaatccctggatagtcacgaatcatcttatataaatcttgaagtggtaaagactctaagtttacattcaattcttggaaaactttcgaacgagtagaaataatctcatccgttccgctttctgtcatacgtaaaatctctttaatttcctcaatcgttaatggatctgagaaaatattacgttctgtatagggaatatgattttcctctagccataatttcgcctttctacaagacgtacagcttggagaactatataatgttaccatacaaagctcactctccttaaagagtacaaattctgtactaaatacagttttaatttctaacttcagcaatttttcgtgataacttgtcttattgaaaagtacaaaaatcacatttcatgtaagcaacaacttataataaacaacaattacttttaataagtaacttctataatcattatacaatagattttgcaagaaatatacagtaaatttcctgctagttgagaaaactctcccgtgtatttcactgctatgtaacatgattacgctcatttcagctgtactttaacaataactttcaacccttttactactcacttcccatagatttttcatataatatatagttatttatctataatcttccctatgaaaaagagaacgttttcttactttttcttgataaatcaattaagaaatgtaagactatacaaatgagaataaaaaggaacatttgttcttattttaacaaatatcctccctcctgtctacatgatttctaaagtaaattaaatatttttctgacatttctttctttttcattttttatctcatacaataaacatacagacaggcaaagggggagttttcaaatgattgctttttttattgattttattacggttgctgccctcatcatcggaataacagcattgattggtgtcattacaaatagcatcggcgaaaagctctttggtggaaaagaaaaaatgaagtttgttaacaaaagtttggatgtacaatctggctggaaccaagttggcggaaaaggcatttataagaaacgaacgtattaaaaaaagcaggtgatcacctgcttttttttcttatttctctactgacgcccatttaaagcttaaatcgccgccatatttatggttatacatatttttaattgaatctctttgtaaatatgctctaccacgttgatatactggaacgatcgcagcatcatcaagtaacattttttctgcttctaataagttcttccaacgagcatttacatcgcttccatcttttttcgccttcataatgatttcatcgtattttggattagagtacttcatcttattttgtgacccatctgttacaaacatatcaagatatgtaattggatctgggaagtccgcactccatccagagaatgacatgacataatcgcccgcatcttctaattttagtttttgtgcgaatggttgttgtttaatttttactgttaaacctggtaaattcttttctaattcaccttttaaatattcaccagttttctttgataactctacatcttcatttaataattctaattcgatttcatttttaccaagttcttttttaccagcttcccaatatttcttcgcttctttcacgtttggttttacaatatccccgtttacagcacggaaatcttttttatctggtcctttaatgaagttatcaggaattaatcctgtcgctggcttagaaccgttatttaataatgtatccacgaatggcttacggtcaaaagcaagtgaaattgctttacgaatatttttatttgctaaagctggatctttttgatttaaacgaaggaagaatacagatgtatcttctactgtttggaaatctggttttcctttatatttatcaataaactccgctaataacgacgctcgatcaattgcatttgtttcatataagttaattggcgtagatgtatcttttacaatattaaagtttacttcttcaatcttcacttctttattgtcccaatatgacgcgctctttgtcattttaaagctacgttcatgttgccaatcacttaatgtaaatggcccgttataaagagttgtattcgcttccaaaccaaacttcgtaccttgctctttcacaaacttttcattcacaggatagaagattggatataccattaaatctacaaggtatggaattgaattatctaattccacttctaatatataatcatcaatcgcctttacccctaattgatccggactcatctcttttttattaattttctctgcattttttatatcatacataatgtacgctgatttcgcagctgtatctgggttaatcgctctttgccatgcatatacgaaatcttttgccgtcacaggctcaccatttgaccattttgcgtcttcacgtaatttaaatgtatattttttaccatcttctgattttttgaattccttcgctacaccaggaactagcttatcatcttttcctaaactgtataagccttccatcgtattagtcattactcttgaagaaactgcatcagctgataacgctggatccatcgttggaatttcttgtgtttcaattaagttaataacttgcttcgcaccgctttttccgctatcccctttagcgtttgcttgcgattcatctttttgatagctacatgcccctaacatcatgctcatcgctactgttgatgctacaaaaactggtatcttttttttcatacttccaccctccaaaaaaatgttaaccctttcattttcaaacaaaaagaaatatatatatgttctaataattcatattatacacacaaatatattttttgtatatttatatttctatttcattaaaattttccgttaaaaaatatacctttgtaaacgtttcatattgctgattattcatactaaagtgttaaaaataatatttttttacacttttctaaattatcagagaaaaacgaattttatatctcataatattttatgtataattatccttttgtttttatcataaaatagcactctcttcataataaaaatatgtaggctaaaatgagtgcaaaggttaagaaagtatgttacgatacattttgctaaaaatagatatcggtaaagaggggacggacatggcagcaattcaggcaaaaaacgggcctactgagaaattaagtttattcttattaacatggcctatttttctagaagtttttctttttatgttaatggggatcgctgatactttcatgttaagtgcattatcagacgatgctgtatctggggttggtgcagcgaatcaatatcttcatattgcgattttggtattagaagtcatcgggaacggcgctgctatcgttgtatctcaatacctcggttccaaacgctttatggaagcatctaaaatatcagcattagccgtcacattaaatttaatagttgggctcgttataagcgctggttttcttttattttcgaaacatatgatgctcgcaatgaacttacaaggcgatgtactaacgtatgcgcaaaactacttatctatcgtcggaggagccatcttcctacaagctattattaactcattagccgcaattatccgtgtacacggttttacaaagcaagcgatgtttatttcactcggaatgaatatgattcatatcgttggaaactacgtactcattttcgggaaatttggtttccctgagctcggtgtacaaggggctgcaatttcttccgctatcagtcgattgatcgcacttattgttttcttctggttactataccgcgttatggaatatcgtgtgaaattacaatattacttcactttatccaaagaatacattgggaaaattttaaaaattggcattccatctgcatttgaacaagtgatgtatcaagcttgtcaaatcgtcttcctttattacgcaacgtacttaggaacggaatcattagctgctagacaatacgctactaacatttccatgttcacttatttatttgcaattgcaattggtatgggaacagccattattattggccgcctcgttggtggtggcgaaaaagatgaagcatacgaacgcttgtggaaaagtgtaaaatgggcaattggtgtaactttatgtatggtcgctctcgttattacattccgtacacaattaatgggactgtttacagataatccgcacattatcgggttaggcgcaagtgttcttttactaagtgtactacttgaaacgggacgtacgatgaacatcgtcatcattaattcgcttcgtgcagctggtgatgcaaaatatcctgttttaatcggtgcattctctatggtgttaatgagtttaccactaggttactttttcgcctttcatttagatatggggctcgttggtatttggctagcaatcgccatcgacgaatggacacgtgccattattatgttcttccgctggaaaagtagagcatgggagcgttatgcacttgttaaacctgaagaacaagaggagaatgtttctgttcaagttcagtaattttgcatatggatatcactaatgatacatgagatttatatcggcgattctttaaatatatcgactgaccgacaaatgtatacaattcttttatatagtagaaaagagccatccttccataacagaagaatggctctttttcttattgataaatctctttatatttcttgtactccgcttccgaacatagtacgaaatgtcctgggcgaatttcacgcattgttggtgcttcactaccataattatgctgtgatggatcatatacgatacgtttacgattgcgctcataatctggatctggaagtggaatcgctgataatagtgatttcgtatatggatgaattggattcgcatataattcatcacttgttgttaactcaacgatttggccacggtacattacaccaatacggtcactaatgtattttaccattgataaatcatgggcgatgaataagtatgttaaacctttttctttttgtagctttttcagtaagtttacaacttgcgcctgaatcgatacgtcaagtgctgagatcggctcatcggcaatgataaattctgggtctacagcaagcgctcgagcgataccgatacgctgacgttgtccacctgagaattcgtgtgggaaacggtttgcgtgctctttatttaaaccaactgtgtttaatagttcatgaacacggtccatgcgctcttttttacttttcgctagtccgtgaatatcgataccttctgcaataatatcccctactgtcatacgagggtttaatgatgcatatggatcttggaaaatcatttgcattttacggttgaatttcttcagctctgcgcgtgattttttaccatgtacattttcaccatcgaataacacttcaccagcagttgcatcatataaacgaataatcgttcttccagttgtcgatttaccacaacctgattctcctacaagaccaaatgtttctccgcggtaaatatcaaatgaaatatcattaaccgctttgacaacaccaccactcacgtcgaagtgctgctttacattttttacttcaattaatttctcacgttgtttagtcatgttgttcacctgctttcatttgaagaatgcgtttttcaacgactgccggcggttttacttctggagcttgctcgtgaagtaaccaagttgccgcatagtgcgtatcacttactttaaataaaggtgggtccatttcaaaatcaattttcagtgcctgtgggttacgtggtgcaaaagcatctccctttggcggcttcaataaatccggaggtgttccagggattgcatataactcttcttctgaaccatctaaacttggcatagatgcgattaaaccccaagtatatggatgtttcggattgtagaaaatttcatctacagttccaatttcaacaactttaccagcgtacataactgccactcggtccgcaacgtttgctactacacctaagtcatgcgtaatgaaaatgattgctgcttctgttttttgctgaatgtctttcataagttctaaaatttgcgcctgaatcgtaacgtctagcgctgttgtcggctcatcggcaattaataatttcgggttacaagctaacgccatcgcaataactacacgctgtctcataccacctgagaattggtgaggatattgttttaaacgagcttctggatttggaatacctacaaggtcaattaactctaaagcaactttacgtgcatctgctttactcatcccttggtgtttaattagaccttccataatttgatttccaattgtcatcgttgggtttaatgatgtcattggatcttggaaaatcatcgcaatatctttaccgcgtacttgctgcatttctttttctgttaattttgttaagtcacgaccttcaaatacgatttcaccatttttaatgcgtccaggaggattcggaattaatcccattaacgctttagaagtaactgatttccctgaaccagattctcctacaatcgccaatgtttctccttttttcaaatcaaaagtaacgccgcgtacagcttgtacttcacctgcatgtgtatcaaaggagacttgtaaatcttttacctctaacaatgttttcatctttgcctctcccctcttttacttacgcatttttggatctaacgcgtcgcgtaatccgtctgccattaagttaaacgctaaaattaatatactgatgacaaccgcagggatgaacatcatatgcggatacgtttgaatagatttataaccatcatttacaagagaacctagtgacgcaaatggtggctgaattcctaaaccgatgaaacttaagaacgcttcaccaaacaccgctgatggaattgtaaacatcgtcattacgataataggtcccattacgtttggaattaaatgtttcacaattaattgtgtatttgttgcacctaatgtacgagatgctaatacatattcttggttttttaactttaagatttgtccacgaacaatacgcgacatccctatccaacctgtaatcgccatcgcaagtgtaattgaccaaataccagatcccataatgattaccattaaaataacgatgattaagtatggaataccgttaataatctccataatacgttgcataatgttatctactctaccgccgtagaatgctgaaatacctccgtatgcaaccccaattactaagtcaattgctgccgctaaaagagcgatatataatgatacgcgtgtaccttcccatgttcttgtccataagtcacggccaaggtcatctgtaccaaaccagaagtactctttaatatcacgtttttcatattggtcaacaccatattgatctgtaccgtcaaatggtaaccaatgaacattttcaataactggaatttttggtggtaatttcgcacgacctaaatcttgctctttatacgagtgtttacttaccatcggtccaaaaatcgctaatagcgcaatgataactaacaatacaaggccaagcatcgcacctttatgttggaataaacgtcttcttacatcttgccaaaacgttaagcttggacgggcaatgacttcattatcaacattattttgattggcttgttgaaataaatctggagataatttttgtacatctttcatcattttttccctcccgctaaacgaatacgaggatcaataattccgtataaaatatcgacaatgaaaataactaaaatgaagatcgcactatagaaaatcgtagttcccataataactgtatagtcatttaaagtaatcgatttaacgaattgttccccaagtcctggtacagcataaatttgctcgataacaagtgttcctgtaattaatgccgcaaccattggtcctaaaattgttacaactggaattaacgcgttacgaagtgcatgtttgacaatgataacgccttggctaattcctttcgctttcgctgttaaaatgtaatcggcttgcataacttcaattaattctgcacgagagaaacgtgcgattgtcgcgataactcccatcgataatgcaattgtaggcattacagtaaactctggtcctttccagaatgctactgggaaccagcctagttttacccctacgaaatattgcagtaatgcggcgaatacgaatgatggtaccgacattccgagtaccgaaataactgttgcactataatctacccacgtattattacgaagtgcggcaacaatacctaaaattaaaccgataaatgttcctaatataatcgcttgtaaacctaattgggctgatggtccaatacgatccacaatcatgtctgttaccgggcggttatcatattggaatgatacccctaaatcaccttttgctaagttacctaagtaacgtgcatattgaactggtaccggatcattcaatccgtatttttcaagaatgatttctttttgtgccggtgatagcttctcctggtttttaagcggagaacccggaagtaatttcatcaaaaagaaagtcattgtagtaattaaaaataatgtcaaagccatgtacacgaaacgttttaatacataacgtcccatagtcaagcacctccccgtttttctcaaaagcaataagatagtttaaaatattcttacttttatttttttaaaataagagcatatgcccatcataggcatatacccttgtaaacgatggaaaaaaaagattatttttgttcaacagatgcccatttgtaagttaatttaccaccatagttaattgggataatatcttttacggcaccttttactacatacgctgaacctttttggaagattggagtgataactgcatcctctttaattaacatcttctctacttctagaaggttgtcccagcgagcttgtaaatcttttgtatctgttttagcttttaggattaactcatcatatttctgattagaataccctgttttattttgagaaccattcgtaacaaacatatctaaatatgagattggatctgggaaatctggtccccaaataccaaacgcaatatcatattgctgagaatcttctaatttatttttttgtgcgaatggttgctgtttaattttaattgataaacctggtaagttcttttccatctcaccttttaagaattccccaacttttttagcatcttcattatcaaagtttaagaattctagttcgattttatcagttccaagctctttcttcgctgtttcccaaagcttttttgcttcttttggatttgtttcaactagctttccattttcagctcggaaatcttttttatttggaccttcagcgaaatcttttccaacaaatccgtaagctccaattgcgccgttatttaaaataacttttgcaatgttatcacggtcaaaggacattgaaattgcttttcttaagtttttattacttaagtactgattactttgattaaatcttaagtaagcaacccctgcctcttttcttgtttggaactctgggctttttctaaacttatcaacaaattcagacgttaaagccgcccgatcaatcgcgtttgtctcatataaatttacatcagttgctgtattttttacaatattaaagttgatttcttcgattttaaccgttttattatcccaatatgaaggattcttcttgaattggaaactttgttcatgtttccaatcactcataacgaatggaccgttatataatgttgtatttgcctctaaaccaaatttatcaccttgtgcttttacaaagttttcatttagtgggtaaaatactggataaactgttaaatcgataaagtaaggaacgggattgtctaattctacttctaatgtataatcatcaatcgcttttacacctaattggtcagcaggtaattcttttttatgaattttctctgcatttttaatatcgaacataatgtatgaatacgttgcttttgtatctggatttactgctcttttccatgaatacacaaagtctttagctgttacaggttccccattcgaccatttcgcatctcttcttaatttaaatatgtatttcttcccatcatctagcttttcgacatcttctgcaactccaggcattctcttttggtctttgccaatacgatataaaccttccatcgtattatttaatgctgtagaagatgaagaatcagatgctaatgatgcatccattgacggaatttcagataactctgttaaattaagaatctgttttccgttactactactcgtagcgttctctttcccttttgcttttgcgtcatctttttggtagctacacgcgctaagcaacatacttgcagttaaagttgatgcaagtaataacggtatctttttcttcatgttgtgttgcctcccctaattgcacttcctgtaccctcacttgttaaaaagtagaattgaaagaataatctccaagtttctacaattttcattatacatataatataacaattgtgaatatagttttttgtttttttgttaaaatttttaataaaatatttatattttaaatttttcgtaaagggatacattaacattgctaccatcatcttaaaatcagacctttaattgcgtataattttcaaaaaattaatcctagtacttattatagcttttatagtataataattctagtaatattttgacggaggggaatattttgaataaagttttttttcatacttgtatactaatttttatagcgatgattgcttctagtattggcgcattcctcatttcatctcaatttttgttgaactttgtcaacattttgttttatattgcactgttttttattcttatcggcggttttttatacatatttcaaaatggttttttcaatgtaaccatttacgcattccaaagagtatttggtacgaacaaaaagattgactctttaattgaagaagtcgaggaacctacagataagaaagaacgtatttataaaacatattcattcaaatggacatatccaatttgtattacaggtatcttccttgggttgttctcgacccttattagctttactattttgatgtagtttgcaaacactatcccatatgatataataatcagcaaaacattttgttataaaactttagttctttcatattaaaagagctcaagtaacaataaataaatttatatgtatgcgatgataaagaagagtacatattgaggcaatttcagagagcttgtggttggtgtgaacaagtaattgtacagtatggaatgggcttttgagcaccaaaccgaaccgaaagtagtaggctttggcgttatatcctaacgttattatggattagagagatttcacagtagtgaaataattagggtggtaccgcggtccattcgtccctatagtttttgggatgaatgggcttttttgtttgccttctctccccccccatcacgcattcaattttaggaggaattacttatgtcagttatcttttctggtattcagccaagtggaacgattacacttggaaactatttaggcgcaatgaagcagtttacagagcttcaaaatgaacacgactgttatttctgtattgtaaaccaacatgcgattacagtacctcaagatcccgtcggacttcgtaaaaacatccgcagtcttgctgcactttatgtagcatgcggcatcgatcctgaaaaagctactttatttgtacaatcagaagtaccagcacacgctcaattaggatggatcatgcaatctgttgcttacgttggagaattagaacgtatgacgcaatataaagataaagcttcgggtagagattcagttccagctggattacttacgtatccaccattaatggctgctgatattttactttacaacactgaaatcgtaccagttggtgatgaccaaaagcaacatatggaattaacacgcgacctagcagagcgtttcaacaaacgcttccgtgaagtgttcacaattcctgaaattcgtattccaaaagtaggcgctcgcgttatgtcattaacagaacctacgaagaaaatgagtaaatctgatccgaatccaaaatcaatgatcagtatgcttgatgaaccaaaaacaattgaaaagaaaattaagagtgctgttactgactctgaaggtattgtgaaatttgataaagaaaacaaacctggtatctctaacttattaacaatctactcttcattctctggaaaaacagttgaagaaattgaagcaatgtacgaaggaaaaggatacggcgacttcaaaggcgacctagcgcaagtagtcgtagaagcaattcgtccaatccaagacaaatataacgaactaatcaactcaccagaactagacgaaattctagacaaaggtgcagaaaaagcaaaccgcgttgcattcaaacaactacgcaaagtagaaaacgcaatgggactaagcagaaaacgtaggtaacatataaagtggaagcggctcgttcagctctgactggctaaggttctttcgcataaaaggagcttttttccttcttatgcggaaggttcttagacacgaagagcttgccgctggagctggattacatataaggtggaggcggctcgtttagaatgtgagggggatggagctcctgacgtagaggcgctttttgcctcgcaggaaggcgcgaagccaccgaacattcttgccgctggagctggattactacaaaattaaaaaaccgccaattggcggttttttaatttaccttttgctcattttccatttcccataacttttcaaaaaatggctgtccttttacgagacgctcgcataattgttcatgcttatcagaccagcctgttttcgcttcatcatacagcttaacccaaatatcttcaaattccatatgttgaaccattccatatgctgatggatcccactctgtgaaccaatagcgaatttctgctgtatttttcgttgtatgtaattgatctaacgccataaataataattgttttagctgtctttctttacgagtcaagccattcataatgaaaggcgatggtgataaaatgtgatgttctttttctgtttcttctacttggaactcatacttttctgcttgtacgttttctaccatctcatataccatctgctcttggcgtggtataagtctgcttttgcgaattggtacattgtaaccaattgtgtcaatcgcaataattccttttccatctgtaacaacaaagcaatactcttgctgcaaacgttcatgatttttacgaatataagccttatgatgtacgtcttccagcattttttgcggaagctctaacaattcgttctcgatgtaatgatataatgtggcatctacttttaataatggcacttgatctaatagctcaatcgtatcatctttccgccattcgtaaaaatgacaaacgttatacccattttcttcaccttcaaaccaatttacccatacatcatgtagatataacattcactacccctcacttcactactgtttgtaccaatcattatgttcatttttgcttaactttattccacttgaggaaatatattctaattattattttttcttctattaatactaaaaaaacaggaaatagaactcctgtttttttatatatgaaatgtacttgctttattcaatatttcttttgcatctatagataataaagaaagtgtatcttctccttccaaagttacacaatctttgacaatatgaaatccaagcgcatagccaagcatcttcggataagagtgaaagccatttaataagatgtcatgttcccttgttcctcgttttatacttattctttcatgtacaatatttttccaataataaatagcctcttcctttgaaagatacgccgtccacggtgcattgtttttttctgtatacctttctgttactgcttgttcagctagcccttccataatcatcgtatcaagtaatgtatattctgtttctttcgtctcaatttgatgtaacctgcatatgtgatgatattcatgcgctaataacacttttaattcttctaccgaattccgtccacatacgaataagaaaataacatgacgcatagataatccagccctaccgttatactcttcttgtacagttcgattataggaatctgataataaaataaagacagggacatctggaccttttaaccagtttttcagtttatcatactccaggctcaattctttccaaatttccttttcctctaattctttaatttccttttctccgcgcataatcgggcgatacatcccttttgaaattaaaaagcgatacaacctttcttttggcaacggaatatacttcgtaaatttctcacaaagtttttctggccgcccataatataaatgtagccattcagctgtttcaacaatccccatctttatccctcctttttcttatgtatatgctacaggagaaaaaggcgtaaaaataaataaggagttttttcgcaatatattgcgaaaaaactccttatttcatctattatttatacgatttaaatactaacactgcgttatgaccaccaaatcctaatgagttacttaatactgcatttacttcttggtgtctcgcttgattcggtacgtaatctaagtcacattctggatctggtgtctcatagttaattgttggcggaattactccgtctgtaattgatttaatagagaaaatcgcttcaacagcaccagctgctcctaataagtgacctgtcattgatttcgttgagctaatcgctactttatacgcgtgctcaccgaaagtttctttaattgccatcgtttcatatttttcattcgcatccgtacttgtaccatgcgcattaatgtaatcaatatcttctggctgtaggcctgcatcagctaaagcttgacgcattgcacgcactccgccttcaccaccaggagcaggcattgtaatatggaacgcatctccagttgcaccataaccagcaatttccgcgtaaatgtgagcaccacgcgctaatgcgtgctctaattcttcaagaattagaatacctgagccttcacccattacaaaaccgctacggtttttatcaaatggacggcaagccgttgctgggtcttcattaaatgttaatgctttcgctgagctaaatcctgcgaatgccatacttgttagcggtgcttctgctccgcctgtaatcattgcatcagcatcaccacgctgaattgctttaaatgcatcaccaattgagtttgcaccagatgcacaagccgttacagaacaagtgttaattccttttgctcctgttgcgattgatacttgacctgctgccatatccggaatcatcatcggtacgaagaatgggctcacgcggcgtgggcctttctcagtaaaaatcttaaattgttcttcgtatgtttccataccgccaatacctgatccaatccatacaccaattcgaggtccgttttcttctgtaatttcaagctttgcatctgcaactgccattttcgctgctgctactgcatattgtgtaaagcggtccatacggcgcgcttcttttttatcaatatatttctcgacttcaaagtcgttaatttctgctgctacttttgctggaaatagttccggatcaattcttgtaagtcgtccgattccagatacaccctttttaatgttttcccatgctgtttcaacatctgttccgaccggtgtaacagctcctagtcctgtaattacgaccctctttttttccatacaaaatacactcctttttttctctcagtccttatttaccccaacgaagagcgactgctccccatgttaatccgccaccaaaaccaacaagtataattaaatcaccatcttgaatacgtccattttgcaattcctctaccattgcaattggaattgaagaagctgatgtattaccaaacttttcaattgtcatactcattttttcttgtggtaaatttaatctctctcttgcagattccataatacgaatattcgcttgatgcggtactaagaaatccacatcctcttttgtaagaccagccttatccagcacgcgaagacaagattcaccaagttgacgaacggcaaatttaaagacttctctgccattcatcataacatactcgtcttgatatagatgcttaccgccgcttccgtctgctcctaattcgaaagatagaacgcctcttccttctgaaactgctcccattacgatagcaccggctccgtctccaaataataccgctgtatttcgatcattccagtctacaattttagatagcttatcactaccaactactaatacgtttttataagtccccgtttgaataaattgctgcgctgtaatcattccgtacataaaaccagcgcatgctgcacctacatccattgcagctgcatgtttcgctccaatcgcttcttgaatgacacaagctactgctggaaacgcacgatctggtgttactgtcgccactaaaataagatcgatatcttctccgctaacccctgcatcttcaagtgctttttttgcagcctctacggccatatatgaagtatctattgtatcatcggcaatgcgtctttctgcaattcccgttctcgtacgaatccattcatcggatgtatccattattttttctaaatcgtgatttgtgactactttttctggcacatatcttccgatccctaaaatgcccacgttcacatcgcagccctccgttttatatcaattattatgacttggtactaattttaaaacataaatgtatttttgtctagaatatatttcgcataaaacagaaagctaacgcattatccactttatttttcattaaaagaaacagaaacatacctctcaaatataaaaagactcaaacccttctgttcacggttcgagcctctcttccatctaaaaagatgttttttattctttatctgcttttcttctaaactagagagttctcctcactacctttcctttatcctcttcatatctctggttttcccccaggcgagaataaaaaaggccctgaccgcttctatccacggttcgagcctctcttccaccttaaaaagatgctttttattctttatctgctttccttctaaactagacagttctcctcactacttttcctttatcctcttcatatctctggttttcccccaggcgagaataaaaaaggccctgaccgcttctatccacggttcgagcctctcttccaccttaaaaagatgctttttattctttatctgctttccttctaaactagacagttctcctcactacttttcctttatcctcttcatatctctggttttcccccaggcgagaataaaaaaggccctgaccgcttctatccacggttcgggcctctcttccatcttaaaaagatgctttttattctttatctgctttcccaagctcgtaagcttcgttcataactttcattaacaactctaacaccggctgtgccttctccatatcaagtgcaattccattatcatctaaaattgcctttgcttccggtaaatgcttcattgcgatttgtaaaaactgcatgcttttttcgttcatattatactcttcctctccattaaaactttcacatacaatagtgtaacacgcgtactacccttcgtataactctttatattttttcatgtgtgccagttgcttatttaaaccgtattctaacggagtatttctttttatcgaaattacttcgatagcctcatctcttacttcgctgttatttttatttactttatcatccgcgcgtaaaagattcatacctttttcccataatgactgtttaccactaagtaaattgtatataccaagatgcgccccgttcgttccatgttcccataagtattcacatacatcttcaacgtaaagtaaatcattccccttttcctcaatcgtacaacggcactctttttcaactaattctgataaaataagctgatgaaacatcataaaggacggttgccacggtccatataatgttggaactcgaaatacactatattgtaaattcccttttttcaatccttcttctactttcaaaaataggcgcttattttcggattcatctgtactgcctacttcaatagaagaaattaaatttaacttcactttttgttcttcacacattcttataattcgctttaaatattgtaatatgactctttcattccgaaatccactttgctgatttggctcatataagcaaaaataaacagtatcgaatctctcttcctcaaccgatctccatccatcttcatctcttatcgaataatacgtaaataacgcatttcgcccaattaataataacttctcttcattaattttggtcatactatcgaattcatcaaaatcaagaccatagacttccacttcttctgcaatcattttatttacaaggtgataacctacaaacgtaagtgcacctattatcagcacgcgttccataccaccaatcctttccctctgaaacaaatagctcctcatttatgtatatgggagcttcataattcttcttcatattttttaaagaaatcagtcgtttgcctaaccattttatatttcacatcttgcagatggaacaagacagaagtatcacattgatttagttgcctcattttctcatatctacgcaactgctgttttcttcctcttttttcttgtgttgatacgaaaattttaacaggtacacaagatggaagaagcgtaaatgatttcttatttatttttgattctaattcttcttctttggcatcatacgccaaacttaattccttcacgagtctcttgtaaaaaaatttatgctctttctcaaaacttacatattctggtaaatctaaacacggatttagcataacaacagaacgaatacattcaggatatttgttcatcatttcaagtgctacaagcgctcccataccatctgccataatgtgcattttcgcatttaacgtctcttttctcaaaacaacatcatataaacgttttgccagacgaacagattgatcgtttccccaatgtcttccgtataaattagaggaaaagaccgtgtagccttgttcaataagaccatgtaaaaaataagatttacccgcatgttgtgtccataaacttgtaccattctcaataaagtagttataatcaccgaggagcataacagaaaatccatttggcttctccggtaaataaatgacacatggttctttttctaagtaaaaaaaacgttccgtaatactcatttttcccccgccttattttctaaacatataaaagtactcttttataatgtatgaacggaatgcaaatttgcgttgaaaaatctacaaatatttttctatattcttttttcaattgtgttacaataaggacagattgaacgaatagaggtgtaaaatatgcgtttcatttgggcattaatttggtcgttcttacttgtacatatgatgagctatgtaatcggctctatgactggcggtacatacgactttaaccaagcgtctattttctcagttgttcttgctgtgttagtactagcaatttcagctgcaattccaaacgagccagtagaacaacactaaaaaaagagtccggattttatccgaactcttttttatttttatttcacatgaacgactaattcgttattttctacatcaacaactacgtgactattgtcagtaattgttcctgcaattaattctcgtgctaatttcgtttccacttgacgctgtacgtatcgttttaatggacgagctccgtacattgggtcgaaaccagcttctacaacaaattcttttgctgcatctgttaattctactgtaatgtgacggtcagctagacgaccttgtagttcttttacaattttatcaacaatgcctttaatttcattcgttgtaagaggtttgaataaaataatttcatcaacacggtttaaaaattcagggcggaaatgtcctcttaattgtcccattacaagatctcttgattcctctttaatcgaaccatcttcttctaatccatctagtaaatgagcagatccaatatttgaagtcataataataactgtatttttaaagtccactgtacgaccttgcgaatctgtaatgcgcccatcatctaacatttgtaataaaatgttgaatacttctggatgtgctttttcaatttcatctaataaaacaacggaatatggtttacgtcttaccgcttctgttaattgaccaccttcctcatatcctacatatccaggaggtgcaccaattaagcgtgacactgcgtgtttctccatatactcagacatgtcaatgcgaatcatttgctcttcactatcgaataaagactgcgctaacgtttttgcaagttctgttttaccaacacctgttggtcctaagaagatgaaagaaccaatcgggcggttcggatctttaataccagcgcgagcacgaagaactgcgtctgacactaagcttactgcttcctcttgtccgatgacacgctctgataagatttgctctaagcgtaataatttctcgcgttcaccttccacgagtttcgcaacaggaatacccgtccagcgtgaaacaatatctgcaatttcttcttcacttacttcctcacgtaataaacgattttcttgtttattatgcgcgcccatttcttccgcttcttttaactctttttcaattgctggaattttcccgtgacgaagttcggctgctttatttaaatcgtaattaccttctgcttcttctaattcacgacgcagacgttctaaatgttcacgtaagtcacgaactttgtgaatgtcttctttttctttctcccactttgctctcataccacttgcaacttcttttaaatccgataattcacgttgcaatgtttttagacgctcttggctaccacgatccgtttcttttccaagagccgcttcttcaatttccagctgcataatgcggcgcgttacttcatctaattctgttggcatagaatcgatttctgtacgaattgttgcacacgcttcatcaacaaggtcaattgctttatcaggtaagaatcgatctgaaatatatcgatctgataaaactgacgctgctacaatcgcacggtcatgaatatttacaccgtgataaatttcaaagcgttcttttaatccacgtaaaattgaaattgtatcttcaacagttggttcttctgctaatacttgttggaaacgtctttctagcgctggatctttctcaatatatttgcgatattcatcgagcgtcgtcgccccgatacaatgcagttcaccacgcgcaagcatcggttttaacatatttcctgcatccatggctccttctgttttaccagctccaactattgtatgaagttcatcaatgaataataaaatgcgtccttcactctttttaatttcatttaatacagcttgcagacgctcttcgaactcaccacggaatttcgcaccagctacgagtgcactcatatctaacgcaaaaatcgttctatctttcaatccttcaggtacatcctttttcacaatacgctgggctagcccttcaacgattgctgttttaccaacacctggctccccaattaaaaccggattgtttttcgttttacgtgaaagaatacggattacacgtcgtatttcactatcacggccgattacaggatcgattttccctgctctcacttccgccactaaatcacgaccatatttttctaacgcttcataagttgcttctggattttgactcgtcactctttgattcccccgaactgtcattaaagactgtaataagttatctttcgtaatatgcaatcttgtaaataattgatttatatcgcctttttcttcagaaaaagcaagcaacacatgttctactgaaatgtaatcatcctgcagtttttctgcttctttccctgctcttacaagcagttgttgcagagcgctcgttacatacaattttccaacttctgcaccgctccccgttacagaaggtttctttttaattaaactttcagcaccttgctttaatgcttctatatcaacattcattttttgaaatatacgtactgctaatccatcttgctcttctaataatgcaagtaatagatgaacagtatccacctcttggtgatgatgagataccgctaaagattgggcactcataatcgcctcttgtgtttttgttgtcatttgatttaagtccatctttacagccctccaaaagtttgactttctttgacctttgatttgattatacgccaactgacttttttatacaataattttgcctatgtattttcaaacttattatttgaaaaagaaaaagagagcattcattatactgctaaaaaatacggtaaatgaaattacaatgtgtaacgacaaaaaagccgcaataatgattgcggcttctgttacggttttcttttatatgtccactggcggttatgattcgtgttatccggaaacttttcaccggcagttaatttcaccatttgcggatctttcaccatacttcccgtttcaccaatttctacgtaaatgccatcattcggcgctttttgtccagaacgaaacctgcgattttgtcccatcttcattctccttccatgacgtcttgcctcattagtatatccattttaaaagaaagcttttctgtcatgtttaggaaacagtactacatctcattcttgtacatatatatgaatgacacaagcgtaagcagggatttctttcctacttgtagaaaaaaaaagaaaccaacctactctaggctagtttcaaaggagagtcaaacatatacgagaagattacatgttcattatatgcctcaccacacgagcaatgtaacccttttcacaatttgtacataatgaaagaaacattgtttgaactttctaaaaagatgttgacttttcttaatttccaacgataaatagtagacaccacagcactttgagacgtaagatggatatatagtgaaatttccatctatggtgatttcaccgagcctaacctcttatttctgcatattaaaaacggaaatacagatagatacaaaaaaattattataagaggtgaaattatgaacaaacaacatttaatcgcattagacttagacggcactttattaacagacaacaaaataatttccactcgaacgaaacatacaattgcaaaagcaaaggaacagggacatattgttgttatttcaacaggacgtccattccgtgctagttacgattactataaagaacttgatcttaacacacctatcgtaaactttaacggcgcttacgtacatcatcctcttgattcaaactggggaacacatcactctcctcttgagctagcaacagcgcaagaaattgtccgagcttgctttgattttggcgtaaaaaatatatacgcggaagtaatggacgatgtgtatgttcgtgaaattgatgaagataaaaaacatattttcgaattcggctctcctaagatttttaccggagacttattaaatattttaaacgatcatccaacttgcttattaattgacgcacatgacgagcattctactgcaattcgtcaacatttaacggatatgcatgcggaagtaatcgaccatagaaaatggggcgcaccttggccgattattgaaattgtgaaaagcggattaaataaagcagttggattacaaaaaatttctagtcattacaacattccacaagagcgcattatcgctttcggtgatgaagataatgattttgaaatgattgaatttgctggtcatggcatcgcaatgggaaatgccatccctgaattaaaatcactcgcaaaccatacgacgttaacgaacgaagaagatggtattgctttatatttagaagaggttcttgggttgtaatctaaaaattccctacttatagtttcctgccaaatgtccatactataagtagacgcatgagacattgcgtcgattgttttcagctaaataaagggggtttttcgaatgggtaaaaagaacaaatcaaaacgttttatccaacaaggagccgatgctgttatgaagcatgatgcaagattcccgtacagaggtacattagctgaggcagaaaaagcaagaagtaactcttcttttggaggggtttaaatggggaacttactattccaacaagctagagatgctgttgaaaatgccgtatcttgttcaagcggtactgagcaacaagatctcgtgtatagagcaaaaaatgctttgcaatccgcttacgcaaactcttcaactgctgaaaaagttcagctccgtgaaatgcaagagcaattgcaaaacattacgaatttacattaaaaaagaggaccaactttggtcctctttaatctttccgaaacaatccgaacaccccaactgtttgcagtatatttgtaaatgcacctgggtccacttgtctaataatcctctctaattcgtataactcgtaacgggtaataaccatcattaacatttctttattttcattcgtataagcacctgttgctggtatcgttgtaatccctcttactaatcgcgagtgaatcgcctttcttacgtctgccccattcttcgtaacaattaatgctgtaatctttacatgacgagtatgaattgcatcaataattctcgttgatacatataaagtcactagcgtatacaacgctttttcccatccatatacatagccagcagcgataatgataattgcattaaaaaagaaaaagtatgtaccgacaggcttatcttttatttttgataaaatcatggcgataatatctaatccacctgtagaagcaccccactttaaagcaatccctactccaattgccgaaataatcccgccaaaaatcgcatttaatatgatatcattcgaaaccgctctaacagggatgatttctagaaacagagtcataaatataacacaaagaaaactaaaaaaggtgaaggcctttccaacctttttccacgctaaaataacgacaggaatattaaataagctaaacaatactcccgtagatatgtgaatcgataaaaaatcacctaatatttgtgataataattgagacaatccagcaaagccgctcgcatacacttttgctggcgttaaaaataaattcatcccaatcgcgtttaataaacctgcgatgattacaacgattaacttctttataagttcagtataattcaacttcaaatccatttcgaatccacctttacccttcataaatgcaccgctatacatagtctttacgaaaaaggaaatgataaacgtacaacgtttagaaatggagttgatacatatgccacatacgagtgataacgacaaaaaagcacgcgataataacgcaaaacgcacacaaaaaaatgagcaagagcaaaaaaatgagcaagagcaaaaaaatattcagcaaggtaaacgtgcatactctaaaaagaccgatcacctttgattccatcgtacatcaacaattatgttgatgtacttttttacattttaaaggaaaaaaacattaaaaattcacttcatgttcacttctatattctacaatagcgataacatattcggatgaggtgttggcatgagagggaaacatattttcattattactgcactaataagtatattgatgttatctgcttgcggacaaaaaaacggctcagctacagtcgctacagcaacagactcgaccattacaaaggataacttcgaaaaacaattgaaagatcgttacggaaaagacatgctatacgaaatgatggcacaagacgtcatcacaaaaaaatataaagtatctgatgaagaggtaaataaagaagtagaaaaagtaaaaaaacaatatggagatcaattcaaaaaagtattagaaaataatggtttaaaagatgaagaggatttcaaaaatcaaattaagttcaaacttgctatgaatgaagcgattaagaaaagcattacagagaaagacgtaaaagaccactataagccagaaattaaagcgagtcacattttagtaagtgacgaaaatgaagcgaaagaaataaagagtaaactagatgctggtgcttcatttgaagaattagcaaaacaagaatcacaagatctactatcaaaagataaaggcggagaccttggatacttcaattcaggtacaatggctcctgaattcgaaagggctgcctacaaactaaatgttggacaaattagcaatcccgtaaaatcatcaaacggttatcacgttattaaattaactgataaaaaagatttaaaaccttacgatgaggtaaaaaactctattcgcaaaaacttagaggaagaacgtactgctgatcctgtattcagcaaaaaattgttacaagaggaattaaaaaaggcaaatattaaaataaatgatagtgatttgaaagatacatttactcttgtttctccgcaaggaaattaaaaaagcacaaccttatttttttaaataaggttgtgctttttaatctttcatcaatatttccaactttttcttcaagcttttgtaatgccaattgatgtgatctaattctatctccacttcaattagcgcatctattaattcttctttagactgttgtgagttcataatattttcaagtaattgttcgaatctttcagtgctctcatatatatcatgtaaatcaactgctgctatttcgtgttctttttcaagggataataccgagagactctttatcaattgttccagtacattatcttgcattttcgtacctctctttcaatatctcatcatcataagaaattataagatatactgcgttataaaatttcatatacacaccttttcgtcaaagcgtattacccacacttatttttgtttaataactcagatatctaatcccggatagcccctaaatattagggcattcattcaagcccattgctaattatcatacttccaattatccataaagtttctatttcacggatgctctctagtttctttatactcatcaataatatatcctgaataagcagtagcctgcctctcatatccaattctcgttagtcttatatcattaatccattgaaaataatgtgttagttcatgcgcaatagtaaacaaatatcctcccaaagcgtcatctttccctcttttctctagctcatcgtaataatctcctgtcgaaatacgaatatacggctcatcatttcgatcaaatggttcaaagaaagtaccatagaccaactcaccatccatcgcctttattttatatgaagattttacataaataggtactctaattggaaaaaaatattctcggcgtatccatttacaaaactctttaatagctcttctcacttcaggatcaacatctttatcgaattttactcgtagtcccatgcgatgactcttctcttctagattataatatttccgccaatttgttagtatccaaatatgcatataatcatcctaattattttatatttttaatactgtcagcgttgtaaaaattcaaaacacagtgtaaaagctatcacaattttatacataaaatgaaactttaatcagtgatgatcttactgcccggcaaatagcaggataggcagtacaaacactgcgataaatctcttatattcttttagcctttttaatgaatcacataagaaatactacaatcaaaatctcacttaaaaaactacataataattaaccatatatttttaaaactttataacatacctcttctataactttagtttccatcctgcctacttctttcacaatatctaccttatagagcgaatacattattaaaaataaaaagaactatcccttctcttaaaaattcagagaaagaatagttcttttttcatccaccttatttcttaaagtacgtccaaccttcttcttggtaaaccttttcttctttcatcaacttaccaagtgcgcgcttaaatgcagctttactcatgttaaagcgttctttaatatcttctggatggctcttatcccaaaacggcattgctccgcctcgttcttccatatatgcataaattactgcagcatcatcttccattccttcttctttacgaggaagaagtgaaatgttaattgtaccgtcatcttttacgtcaataatacggcccgttacacgctgaccgatgcggacttgttcttttctttctgtatggtgtaggaaagcacggaaatgctcatccgttagtatgaatgaaccaacttgaagtgaacgatatacacgtccgtttacgtttttattacgcatagatggcgttgcatctacgataatttcttgcatatcactgtctcttgccggaagagcaattaaacgatcacgattcgttaattttaacgtacaatataattcgtcgcctacttctggccataccggcatataaatcgggaactcatcagctggaattagtatatcttttgacacaccaatatcaacaaacacacctaaactaggaataacttctacaacctttacccagttccaatcataagttgtaataattggttccttcattgttgctgaaatacgattttggtgatcaaggtataagaatacatcaatcgtatcgccttcttcaatttctccagccacttcgtttttatgtaggaaaatttcttcttcttcattcccaaccatatatccgatttccgtttcgcgtaaaacagttacctgttcaatcgatcctatttgcaaatacatattttttaattcccttctatatatataaaattatcttttttatcattccaaacaaaagttaattataacatgatttttcctatatttgtccaactgcccaaaattcactataataaaatgaggttacatgaatataagtacgaaaacacttaagtctagactcgttttcagctatactttagtatgtacagtacataaaaagattagaaatttatttggaggtgctaactatggcaaaagatagttcttttgacatcgtttcgaaagtagaattacctgaagtaacaaacgcaattaatatcgcattaaaagaaatccagaaccgatatgactttaaaggaagtaaaagtgatattaaattagaaaaagaagtacttgttttaacttctgatgacgagtttaaattagagcaagtaaaagacgttcttatctctaaacttgtaaaacgtaacgttccaattaagaacttagattacggaaaagttgaagctgcaactggcaacactgttcgccaacgcgcaacacttcaacaaggtatcgataaagataacgcgaaaaaaattaacaacatcattaaagaaatgaaattaaaagtaaaaacacaagtacaagatgatcaagtacgcgttacagcaaaaagccgtgatgacttacaagcagtaatcgcagctgttcgtagcgctgatttaccaatcgacgtacagttcattaactaccgctaaaaagaaaactcctcttaattagaggagttttcttttttgtcttgtagagacaatattacgagaacaaactatagaaaaaggtatatgcggtgaaaatcgctaagtgaacagggtctaaccatacgcacactttacaagtgaccgtatgattaaactaggccttattgtagaatttgttttatacatgtatttagcagaccttattgaaaataagaaaaagacacctcaagacgtttcccccttcgatttgaattacttttcttagtaactacaccctagaccaaagtcatcttaaaaatcgctgtaactcataattcctccccccgccaaaacgtaacaatttatgagtataagaatatttcccaacctttaatgtattgtaaaattaataaggaacttaaaaaatgttaattaaaaaagagttagaagtggttatatgaagaaattaatactatggtttttattggccacattctccctaaatactgtaggatgttctaataatgcgaattcactaacggataagtctaactgtatcaacaaagcttggtacaaaaaaactatgtcatgtaatcatttaaaaaacattaaatagttaatgataaaagtcataaaaaaagacacctcaaagcgccttcctccgacttgaaccatcttaattttaattatatttggatggagttaaaaagaagcataaatggttaataaagatgcagacttcaaaataaaaagtacactaagtaaactcttattcaaaaatttatattaaacactaatattttagaagaaagtttataagtttagaacctacagggattttccctgtaggttctattatatttcaagtaatccccaaatgaattatgagtggcttttttcattttggttttcaaaatatttttctttaaccatttttatcagattttctttttctgttagttcaaatataaataatgcttttttcatgttatttgcaatatcttcttcattctgttgtttaaatctcaataaattccatccctttaaatagtaaagttcacctaataagtataaagtatttagattaatagctaatttgactttgtgaacatattccatgacataattcggattgtgatatatttttttaattctaagctctttaatggtaatacccaaatcgtaaaattccattttccacctactatttagcactgtattagtataagagtattctctaacttttaatgtaatgtaaaatcaatatagttacaattattgattgcttcaaagattcttccctatcggtgctaacacaaaaaacaggttaggaagaacatccccttcctaacctggccctcctctcactagggacgttttcattctcacatcgtttctcttaagaaatttcatatcaacagaataaatactatcgcgccaccgaacaaacttacatatacaataagaagacatgaacatagagccagcaacttctcatctacgtttccttttaactgcaattaaaaacgcaataaataatacattcacaccaacgattaaggagataaataaccaattcacacctgtttctccgttaactttatacacgtttgattcttcacgctttaaaacgagataaaattttccgtttccctctcttataatttcatcctgcaacaatcctcttaactcttgtttttcaccaattgcacttgcaggtaaggagactttttgtgtttctttcgtattattaattgctactaaagttacttcatctttatattttcgttttagtatgctcatcccgctcttatcatacagaagctcaaacgtaccgcgtcgtaaagacggtctcgcctgcctaagttcacctagttttgttatgtgctgcataaatttttcgtctgacttaaaatccattaatcgtctattatcgggtacacttcctccatctaatgcaatttcagttccgtaataaaaattcggaattccaggtgatgttaacaaataagtaagcgccagttttaaacgtgatggcggataatacatattttcttttgcaatacgcgcatatctttttgtttcttgatcatctaaaaacgtaacaaattctccttcttttttactcacatcgtataacgatttcaccgatacatctgctttagaaaacgattctactattttttcgttgtattcaccatcctcctttgtcataatacgaaaatctttctttatcacttgcatatctttttgcgcgttatcccaaaaggaacgcggctttttttcactatgtataacatagcttccgtctaaatcaacttcttttatccaccatttcattgcgtcaattacctgtcgttcgttttctccaagtggaaattgaaatacaactttcattccttttgcatgagcttcttttacaagttctttcacatcattgtctgtcccgaaatgttcatttacctttttaaaattttgcacgtctaatccatcgtactttccactttcaaaaagcggcgaaagcataacggtagtaaaacccatttcttttatgtaatccaacctttttataattcctcttatatccccgccttgatacccttctaaattaccaacttctaactgcttgtcatttttcggttctccattattgaagcgatcaatcataatggagtatataacttcatctcgccactctcttttttcgtctgcaaaagtatgtattggtacaaacaaaacaacagctaagcaaaaacaaatgaatagtttcctagtccgtatttttcccacacgcatcccccaagttctttaattgtaagaatattataccaattttctgaatgaagcgcatatgtcgattttaatcctcacaaaataattcatgttaggttttattacatcatatatataatcttctgaatttttagttgattttcggtttaatttcgaatatgatatgaaacataacaaatatatgttattttttctaacattataggaggagagatcatggatatgggagatacagtttttatgtttatggcgacagtaatggtcatgttgatgacaccaggattggcacttttttatggaggtatggttcgcagcaaaaatgtactcagtacaacgatgcatagttatagtgcaatggctatcgtttcgattcaatggattgttatcggctattctttatcattcggaccagattggcacgggcttatcggtacacttgattggttcggtctaaacggagttacctacgcaccaaatccagactactcatctactattcctcacaatttattcatgatgtttcaactcatgttcgccattttaactccagctttaatttcaggtgcatttgctgaaagaatgcgattttctgcctttcttatttttatccttctatggacaacaatcgtttacaatcctgtcgctcattgggtatggggcgtcggtgggtggctaagggaacttggcgccctagacttcgctggcggaaacgtcgttcacatcacttccggagttgctggtcttgtattagctattttccttggaaaacgaaaaaacataaatggttcttctcctcaccatttgccatttacaatgttaggcgcaggtttattatggtttggctggttcggctttaacgtcggcagcgcattatccttaaacgacgtagcgttaactgcatttattaatacaaatatagccgccgctgcctcggctctaacttggatgctttctgaatggttcttccaatcaaaaccgaccgcaatgggagctgcttgcggagttgtttctggtctagtcgctattacaccagcttgcgggttcgttacacctttctccgcccttcttatcggagcaattggtggtatattatgctttggcgccgttttcttcttaaaaacaaaattcgggtatgacgatacacttgatgcctttggatgccacggcatcggaggaacttggggcggtattgcaacaggactatttgcaactactgccgtaaacggggatggtgcgaacggattgttttacggaaacgccgcgttactgtttaaacaacttgtagcaatcggggcaacctatgcctttacaatcataatgacgtacaccattattaaagttattagctttttcctccccgttcgagtagatgagcacgaggaacacatgggacttgatatttcgatgcatggtgagaaagcttatgagtatgtagaagaatcggcaaattaaaacgaaaaaggtgtactccgttctaacacggggtacacctttttcgtatattcataacgatacaattatctcaaactattggtatgtaaatatccttatctatctattcatataaacatcttaccttttcattagtgcatttaaaacgagttgtactgcaaccgcatcatctaaatagccgattggaaatatataatccggaattacatcgaccgataatataaagtagatcagcgcacttcccattaaagcaagttctgcagtcgttcccttcttcttcgtaaatctttcatacaattcttttaaatcattaataaacgggccaatactgcttaccttttgaatcttttcaagaaaccccttttcaatcgtttctttgccttcttctgtttgcgaatattgttcataattcgttaattgctgctctacattcgatatactaaacttttgatcatagagctgtgcggattcaagtaaatgttcaatgttattaatggaaacatgaatatccgattgctcctcctgtttcgtttcaatagaatagcctgctgccacaaacaaatcaccaactggaacaccaagactctccgcgaacttttgcaaatgcttcggatttgcctttcgcttaccatttacaatcattgaaatagtagccgtatcaatttcagtaagcaaactaagctttcgcatcgataaagacttttccttaagtaactttttcaacaacaatccaagattacttttttcattatcttgagacatatctcattcccctttattcacgagaataaccatagttattataagaaaaacaactataatctctatacaattcatattaacaaattttttcgactatttacaagatagaagtcctttatatgtttacattttgtaaacaaaaaagctatcttaaaaaattaagatagcttttcaactcattttaaccatttccgtaataataaaaatacactaccacaaattatgtaagaactcacgaatgtgacaattgctataaaaaatgaatgatgcatagaaaaggtcagtaccattaataagaaagatacgaagattaaatccaataaaataaaataccccgaacttaaaacactttctactaattgtaactccgattctaattcagaatatttcagtcttttatacagtaatctcactttcactcaccttctatgaattaatcaaaaaatgcagcaaaggcaataactaataataatgttccactaatcaatgtaccaaactgacctaaagtgaatttaccgatgcgaacgtgagctatctttcttcccaacacaactccgccccatactgtaataaaactaccaactgcagctgcaatacaaatagcaattggattcaaaccgaacaaacccgctcctaatccatttgtgagcgcattagcagataaaccaatcccaagaaaaatagactccacaaaaccgatttccccagatttaccgatatttttcgttaagccatttatttcagtgtcccccacttctccttcaatctcttgcaccgaaaccttccgaggaattgctagtaagatgattcggagaccgattataactaataagaacgaaccgattacaaccggcattatcccaggtaaaatttttgatagccataagccaaaatatattcctactacactaaataaaaagcaaattaccgaaataataaaatttgatagatgactaatttttatatttcgaatgccataagaaatccctacccctaagttgtcaatacttgatgaaaacgttagcgctaataccatcatccatgctgccatttcgttcaccccttcgtattgttgaacatcccggaaactaacgtgacatacatagcatggaatatgaatatagggagaaaataactccctatattccttccacttaacagctctgtttaaaaacggggtagagtgaaccacttcattatattcatgcgattcacttttcctttttcacgaacggattgaaagatatctcccgtaaaagatcccattttagtagcaatctctttttgcatcgccttattttcagatgccgcttttacactcaagtctagcgcctgttcaaaatgtactaacgctttttctaaatggtaatccacatcttgttcaacagctttatgcgtcatttcttacttcctccttttcctcaacctttgcagctgcttcaattatctcttgttcattagaatgttcttcttcaacataagaaagttctttctcgaattgtttttgcattctatccattttcgcttctacaataatatcttccacttcttctttaatcgtttcaaaagtagacttcacaccttttgcacctgattcaacaagtggacggagtgtatttcttacaacaggtaataaagcggcacttgctaacgctaaagtagatccaataacaatttttcgtatcattttcattactcctttacactgtttttaataatgctagttcattaactaccaactttttcgagtcatcattcttatatgagattaatttaataataggttttgaaatttgagatactgtaccagctacaaaaagaacaggtacccattgcataaatgttaatggagcggtatggaatatacgagcaaatggcggaacatatatagctgataataatacaagccaagacgttcctaacgccgtcacaaagaaacgatcttttgaccaatcacgcatcgtttcgtccgatccttcttgtctccaagagaatgtttgaataagttgacctgcaactaatgctgcaaatgctgatgtttgcgctaccgcaagaggcacgccagccgctaagctcataccgaataaagcaagtgaccctgctccaagcagtattcctcgcgttacaacttttttgtacaactctttatcaacaatgtcttgacgtttcgtttgcttcgttttgtttccaggatttacagctaaaatcatcgctggtaaagcatctgtaataagattcattaataaaatttgaattggtactaacggaatcggcattcccgcaataactgccgcacttgtcactaatacttcagctaaatttcccgtcaataaacatccaaccgctttacgaatattaccaataatcgttctaccttcttttaccccttccacaatggaaccgaaatgatcttttttcaatataagatcggcagcttctttcgttacttctgttcctgtttgccccatcgcaataccaatgttcgctttctttatagcaggtgtatcatttacaccatccccagtcatcgctacaatttgacagtccgcttggtatgcagctactatacgtaacttatgtgccggtgttacgcgagcaaaaacagaagtattttttacaatttcttttaattgttcatctgttacattgtcgatttctacccctgtcaaaacacgatcatcacgattccaaataccggtctgcttcgcaatagaaattgccgtagtcggatgatccccagtaatcatgacaggttttacaccaagttcaatcgcttcacgaatactctcttccacttcaggttttggcggatcaatcataccaactaacccaacaaaaataaggtcattattctcaacattactatacgcaaaacctaatacacgtaatgcctgttctgcaaaaccttcattttgttgtaaaatgacctctttttctttatcacataacggatagatttcaccgttatgttgataccatttacatctagtaaggatcgcctctacagatcctttcgaaaacttatacaatgattcattttccttacaaacgacactcataattttcgtctcagaatcgaacggttcttcatgatgtcgttcaaatgatgccatatccttatatgaaacacccgctttagaagcaaaacttaataaagccccttcagttgggtcacctttcacaatccactgatcgtcttcatgttctaacttactattattacaaagaacactaatttgcagaacgcgaacaaaatctggatgttctaacggcgttttttcactttcatgataagtcgcttcttctacttccatctctacagcagctgcgactttagacgacgttacatccgatattgtaccaactggttcatatccatcacccgatacactccacatacgatttggtgtggcaatgactttaactgtcatttcattcttcgtaagagtacctgttttatcagaacaaataacagttgttctacctaacgtttctaaactagaaagcttccgaacaagtgcattttgcttttgcatacgaaagattcctgcacttaaagcgattgtaatcataatcggtaaaccttctggcacagcagatgctgtaagagcaactgatgttgtaatcatttgcgtaatcggtaaaccgcgtagcaatcctgctacaagcacaataccgccagccacaaatgctcctttaataaaggttttactaatagacgtcaccttttgctgtagtggtgtaggctctgtttcttcccccttcattaaggaaatcatatagcccatctctgtactcatcccggtttccactactatagctctcgccttgccgcgcgttacggatgtgcccataaagagcatattattctgctccgctaacgaacattcttcccctaccgcatccactttcttttcaactggtagagactcacccgttagcatcgcttcattaacttctaaattccaagagtctataatacgaagatccgcaggtacgcggtctccagcttgaaggcagacaacatcacctgggacgagctcactacttgctacctctatctcttccccttcacgggttactatacaatttggcgcacggaattgatttaaagcttctactactttttctgcttttcgctcttgaagggttccaattaccgcattgacgacgagaattgtccccatcgctaatccatcaaacaccccacctgataatacagataatccagctgctccaagtaaaataagcgatgtaaactctttaaattgccccataaatgaaacaatccaaggaacagactgcttcggttcaattctattcattccatacttttcttgtcgcatttgcacttctcgagcgcttagcccttgctgtttctccacttgtaaatcttttattacatcttcttgcgagagtgcataccattttgtagaagtttctctagctaccgagtggttcatattcagtaactttttattagaaaaaatcttctcacttactcgcttcgctctagataaaaacgttaaagatagagcatttgccattaaagcgataataggtgccgtgaatatagaccaaacagccagcatctccccggcaatattccatattttcgctactcgaaaatgttctttcactaataaatcgatttgtttcgcataggcgattgactgaaatatatttttcatttcataataagatacagacggaaattcaatattatcctcacaaacaaataatacttcttccccatccgaacgaatacgctccacacgctctacaacatcactatgttgccaacttgcatcaataccgtgctgcgaaagaacactatgatttacatgtaaactattttgcaaaactgcaaacttccactgattttcacctaattctttcattatttctgtgaattcaggtgtaatcgtcattttcgatccaactaacaatcctacacattttttacctttagcaacgaactgaacgttaaatccttctttgccaagtcctttcgcttctaactcataagcacttatatctacaccatttcgctgcacaaatactttactcccgataaaggatggaatgccttgtatgtcaccttttatcccttcgtcatcaacttcgatttcaaaagctttccttaacgttcttcctgtttgcttcgctcgttgcacaacttcctctttccaatcatgcccacttttctccagcagtgaggctgccgtgcaccaaacttgcccttcatcttctgaaatgcagctaatctccgcttcttcatgacagaatatacgcgatacatcgtcaaatacgattgttctcgttcgggacagttgagataatgatccttcatttggaataagatatcctctttccctcgcaacgagatctccttgtcgccatgcatactcagcagacgaaactgcaggtttcggattcgcagctaataaaaccgccattccgcgtagtggatttctcgtaaaggcccatgttgctcccccaaaaagcatgccccatttcgattgcttttcactgtatgctttaatctccggggataaaattctttctttatacgaatctttctcttcatttatgttcgcttgactacgcttccaatttaaataatttaatagactaagtcccgctagtacgacgatattttcccgcgctagtgcgagtgcaagcgttcctatgccaagcactagatcagaattcacttttttgctagcaaccatttttttgaatcctcgttttaaaaacgggtatcccgtcaaaacagataaagcccccgacaagtaaaaaagccctggacttctagctaaagctgatcttcccataaatagttgctttataccgaacgcacctaatccagcgacagaaagcgctagtggcaatggaacaccttcaccttttttctcgtaagaaattacactagatgaagaatcttctgctttcttcgtttcttcaatattgttaaagttagtattctttgtagtttgttcttctaggagtttaattatttcacaaacggtatgtagagaggtcttgttgatatcgtaagtaatcagggctcttcctgtagagatagagggactcacttgataaataccttccacgtcacgaaaacgttctactatcaagttcgccatgtccaagttgtattttagtttatatatttcaattcgaattcttccaggtaacgatcgtataaatctcgtttttaataatttactctgcatcatcatcctccttatccttgtaaaggaagtaaaatcacttactatctaaggagtaacaggtatgctttcgtaatctacactctgctcagaatgatatgcatttacacgagacgcccatttttcctggaatttagaaatagttgtcggtacagcttctactgctccaataattggcgatactgtttttactgccactttacgtgccgcttcttttactttcggtaaagcttcttccatttctgaactagcattttgaatttgttcttttgcaccgagaaaagcagatactgtttttaccgctagctttcttagcccctttctcgcttttggtgacgctaatataaccgctgctactccaaccgctataccgattggtgatttcataaattgaaacatgtacatttctcctcacttaattttttcgaatttgtaaaatgaatcaatcttatcctaccaagtaaacatgtaattcatttcatcacatcctttttttgtaaaaagtatatatagagtatatatttacgtttgtattatttcaacaatttattagttttttgtaaattttatgttaattcagaaaatatttttgtaaacactcctattcctatgcaattaaacaggtaatatattccatgttttattactcaattgttgaaattatattgagaatttattttgttttttcgcaaatcacaaactaagacacgcacttttacgaaacaaattttatatactataaaaaatgctacaaggagtgattttcatgagcttatcttattggaaatacgcgattcttactcatatcactgcaaatttccgtacctttttattcaatatcattgtcgctattttaggagaaatcgccctctttcttgtcctcagttttattccaaaaagatttcataaattttttgcataaaaaagcctgagttcctatctatcgtagaactcaggccacttagccttattaaataatgggaacttgttacatagatttctcaatacccaatctggtattagggagaatatatcagcgattttttgaatatatcaacgatttttcaaatatatcgattgtttctttcaatatatcaacggttcgacacaacatatcgatttaccaacaaattgcgacatgttttacatgcaaaataccgacataactttatacaaaaaagacgaccgaaacccggtcgtcttttcctatttatttcggagcatttcctacatattgcgtaatatcaacatttaatgcctgcgctaaacgcataccgtattcttgatctgcacggaagaagttacaaacagctaataattttgtgcgttcatttacgtcttttagatcatttgttaagtttgcaattaagttatcttgctcttctttagagaatgaacggtaacgctcacctgcttgtttgaagtcatttggtttctcaattttttcacgagatacatagccttctactttcatagttgaatcgcggtaagctttgtcttcaactggattctctgcatgacgactcggttcgtagttgattgtagatgggttttgattcacttgcatcgcaccatcacgttgttgattatgaacagctgcgtatgggcagtttacaggaatttgtaagtaatttgcaccaagacgataacgctgtgtatctgggtaagagaataaacgaccttgtaataatttatcttccgatggctcaataccatttacagttgcacttggagagaacgctacttgctctacttctgcaaagaagtttttcggattacgatttaacgtcattgtccctacttccattaatgggaagcgatcttctggccatactttcgttggatctagtggatcaaagtctaaagagtccatttcatctaattgcataacttgtacgtgtaaatcccattttgggtaatttcctttttcgattgcatcgaacaagtcacgagttgcatgattgaagtctttcccttgtacttcttgcacttctttcgcatttaagttacgtacaccttgctgtggtttccagtggtatttaatataaacaattttaccttcttcattaatccatttaaatgaatggacgccgaaaccctccatttcacgatagcttgctggtgtaccgtaatcagaaaatacccatgtcatcatatgtgtagattctggacttaacgtcatgaaatcccaataacgatctggcgtttgaatattcgtatcaggtgctggttttaaggaatgtaccatatcagggaatttaattgcatcacgaatgaagaaaactggtaaatgattacctacgatatcgtagtttccttcttctgtataaaatttaacagcaaacccacgtgggtcacgtgctgtttcaggagaaccttgaccatgaataaccgttgaaaaacgaacaaatacaggcgtttcagttccttcattttgtaaaaatgctgctttcgtatattgcttcatactatttttcgttacgaatacaccgtgagcacctgcaccacgtgcatgcacaacacgctccggaatacgttcacgatcaaagtgcgcaagtttttctactaaatgatagtcttctaataatactggtccacgacgaccagctgtacgagaattttggttgtctccaactggagcaccttggtttgttgttaagcgattatttggattcatctagggggatcctcctctttctttcgtagtaatcattatttatttaaaattattataaattaattattatttaaaactaaatctttgtcaactatttccttcacttttttggaaacaatttcagccaaacagtcgataaatgcagattgtgcattcggcatatttggtctgaaatatttggcatttaattcatccgttacaactttacattcataatcgttgtcatataaaacttctaaatgctccgctacaaaaccaactgggcaatatacgaaagattcgtacccatgctcttcatataaatctttcgttaaatcttgcacatctggaccaatccacggatctggagtattcccagcactttgccaacccgttgtatagttttgaatatttgcagcttctgcaattaaatctgccgtatgctttagttgttctacatatgggtctcctgttgcaataattttttctggcaaactatgcgctgaaaaaattacgactgctttctctttattatcaatttctgtaaacgtctcttttatttggtctgcccaatacgaaataaatttcggttcatcataccattgttcaattggttcaataacaggaccaccaatttcttgcgaaagacgaatagcacggtcattatacgctttaatgctaaatgtagagtaatgtggcgctaatacgatactaatcgcttgctcaatcccatcacgcttcatttcttctaccgcatcttctataaatggtgcaatatgttttaaacctaagtaacaagtaaattcatactctgtaaatatgttattcattgaatctgttaatttatgcgcctgttctttcgtaatttttgcaagcggtgaaattccaccaatcgctttatagcgcccaattaaatcttcaagcgcttcttctgatggcgtacgcccgtgacggatatgtgtataatatgcctctacatcgtctaatgattctggtgttccatacgccattacgagtaaacctattcttttctttgtcatctatataacacctcaattttataaatgagaatctttttcagaacgtttgtttccaattataacaagtaataataagtacgtcaaaataataattctaattaagtattatttataaggtgattttgaattttatatgataatttctttaataaaaagcggcttacataattgtaagccgcttttcccttattccttaatatttaccccatattctttaaaccaaacatgaatttgtgctaaatgagctaaaagctgtggcccagtcatcaattgaccaaacactatataactacaataaaagagcacagcgtgtatataaagtgcgaccaacactctatataccatccgcctaatccatctaggcaaacacttgctgtactcttacgaactattttacagtacgtaagggctccttagcaacagtttgcttacacttggcattctgttgctcttttgtatatgcaaaggggcctacattatgaaaaagaaacgtattgatgttatcgcaactaaagaagccttccgcaacttatcattattcaaagatgtggacgaactaaatagagctatacgtgcatacagagacactatccgtatgtctattaagcgtacagatgtaaaatctaaactcattacattacttgaaattttaaagcgccacagctgcaaatatgtaggtgttagtttcctgtgcaaaaacagaatcgctgaaaaaatggaagtttcatataaaactgtacaacgtttaatgaagaagcttgtggatctagagatgattaaacaggtggcaatgaaacgtaaaaaagatatgcttcaaacttctaacgctattattattcaacctattgtggaagaagtgtccaacaagacacaaggtgaacgtcctacaaagtgtcctaccattaaaacaaaacctgtttccttaaaacaaaatataaaagatataaacaaacgtaatagtaatgagaatagcaataatccaaaagagaatatggaacaagctgactttgttgctcattgggtaccagagcgttttatttctttagttggctctttttacagtgaatctaaaacaattcaagaactgtggaaggtcgtaagacagtgtaataaaatcgttaaccatacaacaggtgatacagcatttactaaagaacaagagttagctattggcttaaaagctattaaagaatttgttatgaaaattaaatccggagtaaaaatgaaaaagggtaaattcgcttatttcaacgggattgtaaacaacttaatggacaagtgctacttcgataaagaatttatggccatataaaaaaacacctagctaaattaactaggcgtttcgattttcaaaatatccatgaattgaattttatgtattgcatttggtccatcactcactacaattctattcagttgttgttccagtttaattattttaccttggataacatctggttctttatattttcgatacacagtaaatactaattctgtatcatcttgcactgccaattgaattaattcagcagcctcttgttgttcgaattcatccatgtatggtctaggttcttttttagtagcctttttctttggtggttttggaattgctgttgacatatgatctcacctcattatttatttttaagcatattgatagttatttctaactttatcaacagaaagtatattagctaatttcagcattctaacttgttttttttgcatgcaatacactaatacacgatcttcatatatctttctaacaatcacagttctttgagagaaatctcctgaaccgtttaaataaattaattcaattggtagtttttgattgaacgagcatttaagtaaatgattcataagatgacctccaaaagaacattcgtttgcataaattatagaacgaacgttctttttcgtcaataaattacaaactaacatttacagttgttgtatgaaattggtatgatttaggtataaatctatggagggaaactatatgaaaaaaccgttttataaaaaatggtgggtttggattattgctgcactaataataatttttgttgctgctggtgttagtggtaataaaaaggatggcactaaacctgcggttgcagaaaataaagaggctaaattaacagtagatgactacacaaaaagagtagaaaaagcattaaaagagatgggagaaaaaacaaagctaaaaattaactcaactgaaattttaaaagacgggagaacgtctattggtttatcagacaatattattattgttttagaaactgataataataaaaatataaaaaaagcttcattagcaatgactccaaatgcttattttactgagatggaagactttaaattcgctttcttattattaataggaacgatggatgattcactgagttttggagaacgtaatttagttaaacaagaacttggtcttagtgacgaaacagtatttagtaaagatcatacaaaggtttatcaaaaaaataaaataaggtatacatataaaggtagtataaaagaaaactttattctacaagcagaattgcgaaagtaggtgtttaaaataaaaagagattctaattttatgaaagttgttagctctatttttaaggggtttcgtttaataagtagaattataaatccgatcttaaaagcattatctaaaagtaaattttaattacgtagaaataaaaaagccgtcattatgacggctcttactttagtcttcaaacttcacatattcacctgaaacccattggtctccacccacattataccaaccatctctatatccccacgactgatactgttctccttggtacacattttttacaatgccataattagttcctggacctctacgaacacgcaatacatccgctgtaatagtaactattcctacaccattattgactgattgcgaacttgtcggtgtgctttctccagtataatgaatgtatgatgaatcattataaatccactgatcgccaccaaggtttagccatccattggattgtccccatacttcgtaggactcacctttacctaattgacgaataaccccgtatccagtacctggacctttacgaaggtttatgccattcccctcaatatacgcaatacctgtcccgttagttgacggtggaataagcgtaggagttactttaccatctccattgtatgcattttggactctctcgataaagctatcccaacgtccttctgccaacatacgatgaggacagtacttcccactccatgattggtgtgtacgaactttatgaattggaatatcgtactgtttcattagttgagctacaacgatggctgcattgtcttccgctttataatatctatctccaccacttaaagagtagcaaatttcaaccccaatagatttacgattaccattcccgttaccgtcgccagtatgccaggcgttacgctctaaagggattccttgtactgcttctttatcatctaccgcaatatgaaacgacacttggttgccattacgaatcatatacgatacttcattttctgctgtagcatcgttgtaagtattgtggactgtaatgaattccggattcattgtgtaaggacactttataccatatttacttgggtcaactagtttttttctaatttccattattgaacatctccctttttctcttcttgtttttgtttaccacctaaaatttcgactgcatttgttaaagctgaaggcaaaggtattcccatacgccctgcattttctaaaagtgaaagcaactcatttccaataaagaaaaagatcgtcgcttcacgaatagcgctattgcttcctagtgccgaatctaattgagctgccgctcctaccaaaagaaaaagcaccacctttttggcgatgcctttgaaacccactttactttttaattctccgttatatcctgctgcaatcatgccagttaaataatcaataactgccatcgtcactaagattttcaatgttgtatcccatcctcccaagaaatacccgcaaaagccaccgaaagtggcaataaaggtttttaataatacatcaatacgatccatcttttcatctccttttttagcaataaaaaaagaccagctattgctgctcctgctctgtttgtgtgttattttcattagttggtgttggcggttcttgagatgggtaattccctgtaagtgatgcataacactctaaacaaatgttctttttcgcaaatcccatatctagtgagtacaaacgcgctccgcgtttacatatttcacacagcgtagcaatccgaaactttactgtcccatccatttctctccatacttcaaccctgctaacaccgtttagaagacctgcattatttaacatatcggcaggtatttgaacaaaaatccctgtatctgtgcgctctgcatccaccaacctccccataaaaggaaagctttcacctgcttgaagtggcatcatttgattctcattcattcttatcgctcctttctatccaagtgcattaaatttccaaccgcttggagtactcgcataaaaacccgctcccatattaccgtctgtaaaacgaatatgaccccattgttggaatccaccgccacctaagttaattccctgcattgctcgtatattcctaaagattttaacttctttttcagtacttatatcaaacgtctgtccgtctggtgctggagatatattgttatttacaccgcctacagcgagtccgttaaacggctgaatgccatctgctctttctgctgcagcacgatcccaattatacatagatgcatatttcccactgtacagtgttacaccacttacacaaatcgctgtcccttgtctcatgtcagcatttccagaacaaactttaataatcaatgcgtgttgttgcggaatatagtttgttggcactttgaaagtaaaagaataccttctgatttctccataataggtagatggctcagggaagtccatcttttgttcactcaatatgtcgtaacttacgttatctccgaatttaacgcagcatacgtgtattctcggttttcctgtcttacgcacgccatttatcatggcagttctaaaatgagcggatgctgtatattcgttaccaggatgtataccgttattcacgatcgcttccggatagttatacatatctacccttgcagcattcaccatctgctcgtaatcgaatatatgtgtattcttttctattacgacatttccccaggacttccaagtaaggccatatccaccttcaaatccataataatcgttatgtccaatgtttttctttgtaacactagaaaagtctggatctgctattagatttcgtcttgataccgcagttgtttttgtaccccattcgtcttgaaataggaagtctagcattttaacagttacaccatctttatcaatagtgatcttatcaccatcaattctaataagattcgtatcaatgccttttgcagttaaccatttcaccattgtatcggcattaatattcagtttctccgcatcgattgtaatcttaccaggtgacatattaatagaagtaatgataccgtcttttaaaatctgcgctaaaatcccctcatctaacacttctaacttagattctgttttctttacataggcattataagtctcatttataaacgtttcttgttttccagagataattgaaacgcctttttcagtagcactaatacttctttctaactctgtaactttctgattgtatttctcagtagctactttattagcaatatcatctatcattttatcaatatccgtttgatctttgggatgtagccaaaattctgtagctattttaccacgctgcaacataggtaacgcaatccataacgttccattccttctcaaccaaggtttataacgcgctttaacagccccaactggaactgttccggcaataacagatctaatccaattagaattcgcagttacattgataccgattgatgattgtgaaactcggctaccttgggcatttagatactcaatttctaacacgaaaccttgtcctatgttattggacataaagtaacccgaagctacaatgtcttcaccagcagttacgtctatcgtttgatgaaggctataccatttatcttcagtcaatccagtcgcatgtaatttagccgttgtatagcctctgtatgttacagaagagtcaataacagcactattaccattttgtgtccagtatttgaagccctgagcgaatgcagcgttccgtagatcatttatagaacccaatccaccaacataatcctcaacatctttctttttcattgttaactttaatgcgtcagaatgttgacctattgttgtagtagcctcactaatcgtctttccttgcgcagtttgtgtttcctgtaatttcttaacacttgcagttgttccttctgcattcttttctacagtgttaacacgttcatcaaaaaaggtttgtgttttttctaccgttttaatactttctttaataccatccacacttttttcaatctctgttgttttcttagtgaattcatcattcgttacttgattttctggagctggtgtccaatcctgtggcttattccctttatataaagccacccattctacagttgcctttgtagcattatttggataattatataagtttaatctccgttcattcccacttgtagttgcaacagctttgaaagttacataagttattccgttagcatagacacttgttgcatatccaacattatttgaaccaccattctgccaaattccaaattgttgaccctgcgggacacttcctttaattacaaaagtatattcctcacctgcaacaaaattttcagttagagaatatggattgattagataatctgttttttcgtatttagcatttgaatctaataacagattacgtcctccagatttatcattattaacctttgtttctactcttgttaacttttcactaatcttccctgctgcttctttgatctctgttgttaccttggttaaaacattcccatctgcaagatcttcaggagctggccgccaagaatatcctttgctacctatagtcaattgtggtgaactttgctgataccaacaaccagcaggaggattcacgtcaggttctacacgaaaatgactctcgttatccgttcctgttgatgccatcatgcccgctgtcactacgaacgaaacacttacactttgccattgattagtagatttatttggacggatgccggtagcccctgctgcaaaatagaaagtgtgttgtaagtcttggccgttcggtaaaccttttacacgagtaaaaattgaataggttactttatctcctacttttacaacttttcgatctactaaatctttgaagttataagctaaagcggtccatgatgattgagtttctacgactgtattcccttgaaaaacatccttcgaaattttgactttatctgctgacttaagccaccaacgattgtccgcttgcgcagaggtcaaagcaccatcaaaagatttggaaccgattaacaagtttcttacatcgtcattaatgtttgctacactttctttaacttcagaaataactctcttatttccgtccacatcatttactaaggtgttgattttacttgtagtatcagtactatttttcgttaatgtttcaatagaagttttaaatccctcagaatcctgttcaaacttggttacttttttatcaatttcaccttgatctctttgtacatcagaaatagttctcgtaactttttgaaggctttctgttacttgattaaattgcccagtggcttcttcttgcgcttcttccactttcttatttaattcttcttttgtaagtttaatatccttattaacctgctccagtgtatcttttttaattgattccacatcaggaataagaagctcccaccctttaccattccacacttttaacataccaggtttaccgttactaatatctcgccataatgttttacctactataagattatcaattggtgggtttttagcttcaataatatttaccgtattattttttagattttcttgaactttttctgctaactctttagctgcttgagattcttttcgtatggtttcaattgttttttcattctctttcaccagtttgtctagctgatctagcatttcttgtttactacctaacgaactaagaatttgattgtaaatctttcgtaattcttcgttaggatctacaatttctcgataatctccaaatacatattgatcttgtgtaggatcagtaaaagattcagcccagtacaataccgggctcataccctagaggctgcctaatgaaacgacctgtctaactttcgggggtcacttcaattttattccatcgctaaaaaggccttttctattttggctaaaaacttagcactcttctggcttaccagcattcgatgctgtacggaaagatgatccacatccgcatgatgcgatcgcgtttggattgtcgattgtgaatccgccgccaagcatagattgtttatagtcaatttttactcctttaacaattggagcactttctgtatcgataacaaattcaacaccgaaaaactcaagaactgtgtcgtcttcttttggttctacttcaaatcctaagccgtaagaaagaccgctacatccgccgccgtgtacagcaaggcgcacatacttctctccatcttcagcatcttttaacatatctttaatttgaaaagctgcttgttctgttacttcaatcatgaaatacaccttcctttctgttcttagtccattatacatctttacgcttctatcttgtactcatacactccgcggcaaattacttccgcaggtcctttcatcaacacgtttccttcttcagtccacgcaatcattaaatcgccgccagctaaatggactgtaatttccttaccacgttccatctttccatttaaaatagcagctacaactgcagcgcacgctcctgttccgcaagcttgcgttacaccagatccacgttcccaaacgcggaagttcatctcgtcattattcaaaatttcgataaactcaacatttactcgctctgggaacatttcatgtgtctcgagaactggtccaagtgttgtaagaggtgctttttctacatcatcaacaaaaataaccgcatgcggatttcccattgaaacagctgtaaatgcataacgatgattattgtataagaagttttcacgaataaatggtgtttcaccttcaccaagcattggtatttctgcacgtgttagacgaggtgctcccatatcgatttttgctaatgtcacgacaccatcttctactgttacttcagccgttacaataccagctaacgtttcaattgtgaaaactgtttcttctactagtttatgctcatacgcatatttcgctacgcagcgtaaaccgttaccacagctctttccttcagaaccatcattattaaacatacgcatcttcaccggagctacgtctgaagggcaaattaaaatcatcccgtctgctccaataccagtattaatatttgaaaccttttcggccacaagggctaaatcttcttcaggaatttgctcttcaaacatatttacatatatataactattgccaagaccatgcatttttgtaaaagaaaattggctcatttatattcactccaaaaataatttgttatgttaagtataaaatgcatgcttttagaacacaatatgaatgtcccccgtttctcatatttgacaacgtttggcgatgagccactcttacacaatttgtgtaagaaaaaagcccttctaaaaagggcctttttttatttatcctactattttcgattggggaagactaatactcagtattagtcttccccacgaaataaagttttatctaatgaaaaaggtgctgctaattcgcaacaccttaaaacattggattttcatccaaatactcatatacattattaacaagctcttctactgttgcaccttgtacaacttcaccatttacaagtgcaaatggtccttcaaaacaaatgccacaatatcctaaacaaccatactccattacatctaaattcggatctttttctaatttttctagagctgcttgtgaaccacttgcaaggttacctacacaaaattcaattaatggtttaatcaaaattctcccccctgtactacaaaacaaattaccttttcactttatctataagaagaaaactaagctgtttcttgttgttttcgttacacagtctaaactatttagttacttcattacttcacttcaaagtagatgatttcttctatataacatgctacttacaatgaaagagtaacttaaaaagaaaaacagtttacttttcttcttattgtacaacagagtattcattcatgcattgttatttgttcacaaattcgatataatttgattgagtaaagtcaaaatattttattaatataaaattttatgattaggggatatttcaacagaaaaggggtaatccatcatgaaacacctcgtaatactaggtgggggctacggtggaatgagaattctgcaaaggctacttccaagcaaccaacttccagatgatgtacaagtgacattaatcgacaaagtaccatatcattgcttcaaaactgaatattatgcattagttgcgggtactatttcagaaacgcatattcgtataccgtttcctgaacacccacgcctcaatattcaatacggcacagtaacaaatattgacctcgaagaaaaagctgttcatcttgatggcggcgaagcgatccaatatgatgatttaattatcggacttggctgtgaagataaatatcataacgttcctggagctagagaatatacacatagtctacaatcaattgaacaaacacgtaagacatatgaacaattaaatagtctagaaccaaatgcaacagtagctgtcgttggtgctggcttaagtggcgttgaagtagcaagtgaacttcgtgaaagccgttctgatttaaaaatctatttatttgatcgaaaagatagaattttattcccatatccagagaaattaagtagatacgtagaagaatggtttgtaaagcataaagttaacattatacgaaactctaacattacaaaagtagaaccaaatattgtgtacaaccacgatgaaccacttgaatgtgatgcaatcgtctggacagctggtattcaagcaaatgaagttgttcgaaaccttccagttgaacaagatggtagcggacgggttgtcttaactaaatatcataatattccaaataacgatcatgtttacgttgtaggagattgcgcagcacttccacatgcaccatctgcccaactggctgaaggtcaaggagaacaaattgtccaaatattattaaaacgttggaataatgaaccactcccggatgaactacctgttattaaattaaaaggtgttctaggatctcttggtaagaagcacggctttggtttactagcaaaccaaccattaatgggacgtgtaccgagattattaaaatctggtcttctttggatgtacaaatatcataaaggttaatactttacaggctgtctactatgtaggcagcctctttgcatcagtttttaaaaattatcagacacatctttctcaatatttataatgatttatttttcatttttatattaaaaaatattgataaacattgtatgctatttgtaagttgttttattacttcctttaagaccgagttcattcggtcttatttttcatgtgataaatacttttgtaggaggcattacattccacttatgaacttatcgaaactaaacaatcgaatagaagcgaaaaagaaagagctaatctatctcgttgaacgatacggattcactcatgataaagtgatttctttcagccaagaattagatcgtttacttaacttattaataaaactcaagacgaagaaaaaacgttgttcgttataaccattttcccctctttttttgatacgatataactagaatcagaaaggagcgatttatgtttatattaaaagacgttatatataaagatatactacacattccttatttacagattcaaaaagaaaagattacttgtattatcggtgaaagcggaagcggaaaaagcacattacttcgcatgttaaatgatttacaatccccaacatccggtacaattgaatataacggaaagttaatttctgattattaccctattcaattacgtcgtgacgtagttatgcttgggcaaactccacctatttttgatggaaccgttaaagacaacctattaatgggacttcgtctttctgaaaaaccatttccaaatgatgatgccctgcggagtgcattacaaaccgttagcttagacaagcaattagaagatagcacctcctcattatccggcggtgaaaaacaaagacttgcctttgcacgtatcgtacttatggatccgcctgtctatttattagatgaacccacttcagcattagacagtgatacagaacgccgcgttatgaaacaatttactgaactagcacgaaaaaagaaaaaaacagttatcttcatcacacactcgcaacaacttccagaagaaattgcagacgatattattgaaattagcaaaacaaagggtgcaactagaaaggaagtgctctcagttgaagggcgttattgaactccaaatttggcaacttgcagctgcctatattttcattcttattttaattggacttgtaaaattaaaaggaatacctcgcgaaaaacaaatcgcgctcgcaacattccgtatgacgattcagctcgtacttgttgcatatgtccttacatacgtatttgaaaacagtaatccattttatacaatcgctctcatcacttctattactacctttgcaatttttaatatttataaacgggttaacatcccaatgtctaaagaattaaaacgagtagccgccctttccatgatcgccggatcaattggaccacttctactatttatctttgttattatcggtcatgacccttggtatgctccgcaatatatcgtccctattacaggaatgttagttgggaatgccatgactggtgtttctcttggtgcaaatacgttcttaaacaatatgaaatcgcaaagaggtcaaattgaaggtgcacttatgctcggcgcaacaccgaaagaagcagctgctccgctcattcgagacgcttttgactctgctattttaccaacaattaattctatggtcggaatgggaattataagcttaccaggcatgatgactggtcaaatattatccggtgtatcaccattcacagccattcaatatcaaatcgccatcatactcggtatttctggaagtactgcctttgctgtcattatctttttacagcttggatataaaacgttctttaataagcgatgtcagttgaaagaggttgactatgatgcgaggtaaatcgtaactttcgctcagtaaatgatgcatcgttctcggtgagtgaaattatattaacgattttttcaatatatctatcataacttgcaatatatcaacgattttgcaaatatatctatcataactcagaatatatcaacgattttgtacgaaatatcgatttaccgacaaaaagtgacataataaaaagagggggctattcgcctcctcttctatttacttacgccttcttaacgaactgtgattttaacttcatagctccgaaaccgtcgattttgcaatcgatatcgtgatcgccatcaactagacggatactctttactttcgtaccgatcttcacaactgaagaagttccttttacttttaaatctttaataacagtaacagcatcgccatcttgaagaacgtttccgttcgcatcttttacaacttttgcaccatcattattttcagcttctgcttcttggccccactcatgagcacattctggacatacgaaaagaacgccatcctcatacgtatattctgaattacattttggacaatttggtaaagtagccataaattcatttcctccgttcattatttatacgtaaaaatcaaaattgatgtttacatctcgataaataaaatttgtatagcatttctttatagtgccatagtctcacgttattgacaaccctacctcaaattctcattttttattgtattttacaaaatttcaatttgtatgccgtttttctatttgctcttctactaattttaaaaatcttcgttgtgcatttttattttttacgagcaatcgaactcttagcttactttgtaaatatgagcgaactttgtagttcgtaataaataacttttgatacttctcgtcttcatatatcattcgaaaccattcatactgctgcaagtaacgtatgttaacatcaatctttttcgtgtgtaaacccgtacttaaactaatagatcctattagagcttctattaatgctgaaatcatttctctccccctaataaacaaaagaagaaccttcacaagattcttcttttcaaaatgaacgagttctctctagaaacccaaattattttcttcaatgtaaatttgatattcttccacttcttcttcacttaacttcttattattttcatatacctcttgccactcgaaataatcttcatcgaaataaacagcaaatttaattttcacgtttttcttctctgtataatcataaccagtaaactctactacgtcataatctttttctttcttaacaaacttccaagttggattatcagtcataatctctaaagtaaccccttcaccacttgaacgaacaacgtttttaatattcggttcagttggtaaaaaggacagcccgagcgcagctaacccaaacacaatcccgactataacctgtaaaccaatcataccagcaatacttacgccaccctttgattgtaagaaatacgccttctcatgatcagacgaatcttctcccttacgaaaaacacgaacagcatgcttataatataaacggtttccttgccatccagtaaatatcatcattcctaattgaagagctaaactaaatgttacataaatcccatctggaatatctataaaagggggtataaatatactaggtatagccaataacgcaaatataataaataacttatacatttttcgataagctaaccaaaaagttgggaagaaaaaggctacccaattccatgtattcccttgcgctggattttctactttcccccacttaaagtcataataagctgtattcttttgaacaactttatgtaattcttgtggagaaatcgtttcttgtaaaacagtgtccttcacgtacatcatccttttcttatttctatatacatttattgtatatgcacaaaatgaaggaatctaacaaaaagtacacatatttcataaaaatgaacggaaatcgaatatattccgacaattatccgtttcttatttcattttacttttaaatatattaaaataatcatgtatcatatatttaatacactaagttaattattttatatattcactaaaaaggatgcatcaaaatcatttttatacatcttttttagtgaatatatactacatttcctccctcttaatcacattgaaatactattttatttctcgcacattccccttcactttctcaataatatcttctatacgctccgctatacattccggctcccattctccctcaccgtgcatagctgtataaactggacagttctcatcgttactatctacaaaaatcgggtctccaagatatgaatctatccctattacaatccatccttctttccaatctccttcttcattcccgactaagctttgaccttcttcatcaaaactataaccaagttgcccttcttctatttcttcactattaaacaattctatcgtcataggttcagattcatactctagctcaatttcattatcatcagcacgatctacatgtgctaaaagttgtttaattttattatggttaatcaagatatcttctccattctatcttttaaaaatctaattttattcataatgagctgccgcaagtaacatttgagcaataaacttccatgaaatattttctggaaacttctctccttgatttatataaaccgattcacaagaacctaaccaactatttaatgcctctaaataagtctctacctctacattctcccattcatctctattcactttaaaatccttttggaggtatacaagaaattttaataaatcttctttagaatttacgtgatcgaggtattcatacacatccatactccgtccctccctctattgcatgttatctaaactaactataatatatgacataagattcttaaaactattatttgaggtgatcgaatatgaagagtacaatttgggcagacgatgactatttaaaactagcacccattaacgatgaactaatcaaaaaagcagaagaagtactgaacgtaaagcttccagaatcatatataaaccttctaaaagaacaaaatgggggaactcttcgtctcgatgttcaccctacttcaaagccaaattcttgggcagacgatcacgttaatgtatctggtttatatggtatttcttttgatgaaaatgaatctagtattttagagagccgctatttaattcgagaatgggaaatgcctgagaatatcatacttttatctggtgatggacatacatggattgcattagactatcgaaatgtagctgaaaatcctccagttatatttatcgataatgagtttgaggaaattattgaattagcacctaactttgaaagtttcttacaaaacttaactacttatgaatatgacgaagaataagcctggctctaaaaaggagcaagattttattacaaatttacacgccactttaaaaccactcggctttaagacaaaaagacatacatttttcaaagctgaaaacggattttataagctcattaacatacaaaaaagccagtttggagatgacttttatataaatataggagtccaccctatcggtctcccgcagcttattacgcaccaattacaaataaaagaaaacatttcaatattcgattgcattctacaaacgagaatagagcctatacatatcaaacagaaccagctattgcataatgtttcacatgaaactatcaacattccgggttacctttctactattttcgactggtttcaaacgtggacatcttatgaaaatttagtggaaataaatatacattccattactccggtactagctgtcgttccaatattagaagaaaaagcgtttctacttcttacttgtttttctttctacaaattaaaacagtacgaacaagctaatcgctacttacagcaatatttacattgcaccgtgcatctgaatactaaggaaaaagagcccatattctttcacgaagttgatatgtatatgaaaaaactagtagaaagtgcaatgtaatttcacattgttctttctactagtcctttatcacaattttatatcctatcctacaactcccaagtaatattcatttctgcaaatgactccttattagcttccaatccttcgctatcttccgttccaatcattgctacttcttctttagacaacttaatttcctcatttggcctttggatttttttctcatacacgagttgtaaaagctctatttgttcctctgtcagttcatactcttcttccagtctttccattgctgattctgtatcaagtaatggaatttctaataagaatccaccgtgctcttccatctcttcaaatgaatcaattgaatacgcaccactatcctcaatccaaaatgcagttgtaataaaaggaactgtttcgccttctacttcttctaatacgtattgaagtgcttcttctttcgcaatatctattacttccgaaggtgccccttcaaaataacttttcgcatcaatccactcatccattctctcactattcacatcttgaagacatacaatcgtataattcggatgaaacgtaattaccccttgtccgccttggctatcttgcatactatagttaaatccatcccatgaactttcatgtgagaaatctggacaatgcgctacattaattgcatgggcaatcgaatttaaaacgcatcctttccataattgttctctatctatatgtaatttatatttactcatcatcttcccccatgcacatattttttctattatctttcctctacacaatacttgtaaatacttttctatctactacaaaataaaaaagacaatacaccccactgtattgtccattttcttccctaccatttctctctacacatctcaattaaatgtagtaagtacctcttcgtcatatctgcccttctccaccttgagagcattcgcttttcttttggattctgccgtattctctctacttcttttaataaaggtccccattcttccgatgaatgttctaacaagtattgtagtcctctatcttttgaaacgattgttttatggtctagtgtatataaaatacgccccatcgtaacaaccgctgattctacccattcttctataaagaataaatatggcttcttcgccttcccactccagtactgttctacgttgtatttcatcgtatttactacatcattccattgtatttgcagcggaagatcttctgcttcttttccggtaactgtaatgccttgatttttcaacgtccaccatgtgaccgcattaatgtcccaatgaccaacattagctttaccatctgcacaatacacatactcgttcatttcatcattgtatttccctaagtcagcaagcggaatatacataccgtccattcttttacctagcatattatcactaagtttcttatgtagttccacaagctgctgtttttcagcttcattcacggaatcatttatcactgtaacaaaatcaacatcgctcgtttccttatgaaatgcacctagtgcgatggatccgtaaatatataccccgactattttttcatccaaaaaaatttcttttaattctactgtgtaccgctccattaactgctctacttccgttggtaacgcatgcttcactccatttttcatatctatccctccaataaaaaaagcctttgcaaattcgcaaagacttcttgttttataaatatttctcgatttcttcgtaaacatccttcaaacgaggatttccttctccaacaatttctccatttacaagaacgaccggataaaataaatcttcttccactacgcgctctgcgaatgcttttttatccgcatcttcttgttcttcttggaaatcaatatactcgaaattaaatttattttcttgtccttcatatttacgaccaattgccgcttgtaaccactcaaacgtttctgttgaagatggcattccaacgcagctcgcacaaattactttcgtcccatacacttgaacattaaccatttcttctcccccacttcttgtcccaacagtatattcagatgtcttattacataagcacatcattttacaaacttattccatacccctatactgaaaaaacacgatacaaaatttcgacaataaaacaagaagagaaaaaatagattttcccctctatcttgattataataaaactgatgaaaggagtcgataaaaatggaaaacccacatatgcaagaacaagtattagaagtattagataaattacgtccattcttacttcgcgatggcggagacgttgaattagtagacattgaagaaggtatcgtaaaactacgccttatgggtgcatgcggaagctgcccaagttctacaatcacactaaaagctggtatcgagcgcgcgttacttgaagaagtaccaggcgttatcgaagtagaacaagtattttaattaaaagcggaagcggctcgttcaaagtcacttgctaaaaggagaccaaatttggtctcctttttttattcaaatcacatttatccgttaacatcataaaacaaaattggaaatccctctcaaaaaatgcgataattaatactatatagtgaatcgttcacacatataaagtaaaaaacatagggggacgacacatgccaaaaatggggaacacttttttaacaattcaagaactagaaaagaaaaaagagtatttattaggcctttcatccgctataccaacgtggaatacaagctatcaatttttatttaaagaaatccagcaagaattattgggtaaagtaaatgaaaagctcgaaaagcatcaattcgttttaaatatatgtacagatcagcaggtaggggcataatgtattacataaaattgtggtatataaaaaagagacctcactcggtctcttttttatatttttaagataaccaatctaattttctaatcccaagcttatctactggtaaacgaagcgaaccataaaaatgcttcataaattgctctgagcggttcacatcgtgtaaaatggcttctaagcgatctctatatatgcttttttgttcttcgtttccagtttggtaatatcgttcgaccgtttcaaaatagtgcagcgggaacaggagccttgcaaataataagcgccagccaaatgaggatagcgaataattccgttcataatccgtaacaaattgaacgattgtttgctcccagtctttctttttttctatcgtcatatggcggatccattctgcaatatctcgactcgggtgatcatacacccaatcaaaaggaagtttgagacgcttcgtttgatgccataataaaggtgtgaatcgttcttggcaaattgttgctgcatccgttagttgcggcgtatcatccatttctgtatcgacaacatattgaatggcattttctgcaactcctaagtaatacgggaaggattcaataaacaattgatcgaatacatctgaagggtggttcatcacttgtgattgccaaaacttttctaattgatcgagccttttttcccataacgctttccattcaccaattcggcttaattgctcaatttcttctggaaagaatgcacctcgtttatggaatatagaaagctcacttcctaatgacatagcatgtcgttctaacgtgcgcataccttttaataagcaataattttgttcttctatctcacttacatagtagccgtgtatagtcggaacgaaagtcgctacagttatatccccttgctggttcatataatcactgagctttttcatctctacaagtacttcttcctccatttctccaattggaacaagtacataaattttgttgcgaatccaaaagcttttataggggccaagggggattaattctttaacatgcatgtgataatgctcataaatatgctgaatcatcgcagtcgccacctatggtttttctttatatatatgagcttgtgctcgcctttcattcctatgcacatgataaagcaacgaaacgtatacaaatactaaaaagaaaaaaaggtgataaacatgaaagaatcaaatcaactacaagaaagagcattaaaactattacaagaacgcggtgtaacaattgacgatattgctgaacttgttcattttcttcaaaaaaaatatcatccaaatttagagatgtcagaatgccgttacaatgtagaacgtgtactatcaaaacgtgaagtacaaaacgcactgattactggtatcgagcttgatgtccttgctgaaaagggaatgctaagtgaaccgttacaagatattgtaaaacgtgatgaaggcttatacggaattgatgaagttatcgcactttctatcgtgaatgtgtacggctctatcggtttcacgaactttggatatattgataaattaaaacctggtattttagaatacttaaatgataaatcaactggaaaggtgcacacgttccttgatgatatcgttggcggaatcgctgccgctgcttcaagccgtttagcgcaccgagctgagcactcagaataatagtgttttctaggccgtcaggttcatgctgacggtctttcatattccatcagcataaattctcttccgcgactcaaaaaaataggcccttgcttaaatccgatatttttatataacgtaatcgctcttgtattaaatgtcgctacgcttaatcgaaacatttttgcattaaactctttcgtggcaaacgctattccagcttggaagaattctttccccattcctttcccggttaacgccggcttcatgccaagtccaatatcaatcacatcttctccaccatataaatgagcatctcttccaccatataaatgagcatctcttccaccatataaatgagcatctcttccacctggtacttgtgcatttgctccaaaacaaaaataaccgatgaggtctccttgatcatcacaacagccataatacgttccatctaatagctcttccattacttctttctcgcctgaaaaactatataaattatatggttcctcgtacgtccaagtatttatctcatttgcttcttcctctgttaatttatgtatatccactttctctttccccctattatatttctattaacaatattcgatattcatcttataattcatctttctcaatatatttttttaatttcttgcttaatttttatggaagatttttcttattatgttacgattaaacagaatcattataaataaggtggtgacaatttgaattacttttcttatctctcctcagaagaacggcaaaattttttctataaagaacctcttagtttttcaaaaaatataggaaaagaacaactagcttacgcactaggcgctacactatatactcctggcacgaaagaaacgattgcggaagatataattagaaggaaacatgtggatgctatctcaattattctttgtctagaggacgctataagcgatgaggaagtaaaacttgcagagcaaaacatcgtcgttcaaatacagcaaatcgctaacttagtcagtgccaacatactaaatcaagcagacatcccacttctttttattagagttcgacagccaagtcaaatgaagaaaattgttactgaattaggtagtgctgttcattgtttatgtggttttgtctttccaaaattcacaccgattaacggaaagacttatatcgatcagcttgcatatataaacgagttatactcattatcgctatatggcatgccgattttagaatcacccgaaattatgtataaggaaacacgggcagaatcattattacaaataaaggatttactagattcttatcacgattacatcttaaatgtacgtattggtgctactgatttttcaagtatatttagtattcggcgcaataaatacacacctatctatcatattactgttgtccgtgattgtatttcagacattattaacgttttctcaagggcaacaaatgaatatattatttcaggatgtgtatgggaatatttttctaatgatcatgaagaagggcttattcaagaggtatcacttgaccatgcaaatggcttaatcggaaagacagttattcacccatctcatattaaagttgtacaggcaatgcacattgtcacaatggaagattatttagatgcgagattaattttacaaaatgcagatacgtataatggagtgctaaaaagcagtttttctaacaaaatgaatgaagtaaaacctcattatggctgggctcgcaaaaccattttaaaatctaatatttacggggtgctacatgaaaacaaacaattcaccgatctccttattacaaacgcaaagcaacacgtataacgttttaaataatatacaagttcatgtagaagtacgtgataatccatataatttagcgctagacaatctttttcaaatggctgcgagaataaataagaaacgtagttttttatttgtgagtacaatccttggaaagcatcttcctattaaacctgcagtctctctatcaagtggagttgctctcgctgcaagatatatggaaatactacataatatttctcatccatttcaaaaagaaattttaaatctcatttcattagaaattgatgaaatcccagaggaagtatttcgttatcaatatcctctgcaagaagaagttttgttcatcggattcgctgaaacagcgacatcacttggtcattctatgtttcaatgctttcaaaatgcaaagtatgtacatacaactagggaatcgataccccacctagaatctgtcattacatttgaggaagaacattctcatgcaacatcacaccgttgttatgtagatgaaagcttttttcaaaacaacaatccaattgttctcgtagatgatgagatgacaacaggaaaaacagcattaaatattattagatctattcaaaataaattcccacgagaagaatatataattgcttctttgttagactggcgttctcatactaatagaaaacaatttaaacaattagaagaagaacttcaaattaaggttcatgttatttctttattagaaggcagtattcatacaactggccaaccattaaatattgcaaaaaaagagattcaaattgaagaaacaaaacctgatttcaaaaaacatacccttacctgcctaaaatcaccctatacatcaaattatataaaatatactgggcgatttggcatttcagcatatgaacaaaagcacattcattctttcgcccaagaagcaggaaaaactttaaaaagagaaagaattggaaaacgaacactctgtctcggaacgggtgaatttatgtatatcccaatgaaaattgctgctgaaatgggtgaaaatattttatatcaatctacaacaagaagccctatccattctgtttcaaatgatgtgaactacgccattcataatcatttctcatatccaagtcctgaagattctactattacaaattacttttataatatttcacctcatgattacgatgaagtatttgttttcattgagcgtgatttaggggaagaagccctatctcctcttctacagcagttacaaacagttattccttttattcatatcgtctcattttcaaatagcatagaaaaggaaggttgataattatggtaaaagtaaattctcatattagtagttacaatccaaatgatgctatttttctattaaaagatattagtgatttaatgaaagaaagttccacggaaactagagaacaagcaattcaagctggcacacattattccgaaatgttaccaatggaatataaaccctctaaagcgtatatggatttattcttttcttccctgcaacaatacaaacacaaactagccatcgctgttggagttgtcgccgaacagattatacaaactaaaggaactaaccttgtcctcgtttcattagctcgtgctggtacacctattggcattcttatcaaacgctacatacgctatcaatacaaccttgatgtacctcactattgtatttctattgttcgcggacgcggtattgatgaaaatgcactccattatattttggaacatcaccctaaagaaacaattcaattcattgatgggtggactggaaaaggtgcaataaaaaaagaattagaatatgcagtacacacatttaacgaacgaaataatacacacatttctcattgtatggctgtgcttgctgatcccggttactgtacttcaatttacggtacacgtgaagattttcttattcctagcgcttgcttaaatgcaacagtctctggactcattagccgcactgtactaaatgacacctatatcggtccaaatgattttcatggtgttaaatattataaagagctagagcaagaagacttatcaaatttcttcgttgatgaggtaacagatttattcccttctgttcattctcatatagataatcaattacgttatattacttcaacttacactgatccctcttggcaaggattaaaagatatacagtctatccaaaatcactttgaaattgacgatattaacttaattaaaccaggagtcggtgaaacaactcgcgtattactccggagaataccgtggaaaattttaatacgtaagcaaaacaatcccgatttaaagcatattttacttcttgctaaagaaaagaatgtctctattgaaatctatgagaatatggcttattcatgttgcgggctcattaagccccttaggaggaaaacgatatgattttcgccagtgatcttgatcagacgcttatttattcccggaaatcgtttcgtgcccctatagaagatgaatcaattcaactcattgaaactttagatgggaaagaaatttcttttatatcacataaaaccatttcactactaaaaaaattacaactgcactcacatttcatcccagttacaacaagaactattgagcagtttcagcggattgctttattccaagacgaaatcattcccgaatacgccattacaagtaatggcggtaatatccttcataacgggaaacaagatggtacttggaacaggacagtaaaagaaagactatcggttgaatgtatagagagaaacgacatactaaaggaatttggacaaatagctcataaagattgggttatatcacaaaaaacagccgatgatctattccattattgcattattaaacgggagaacattccttatgatgaattatcatctttcacttcctggttagacaaacaaggctggaatcattcacttcaaggtagaaagctatactttgtaccaaaaccaattaacaaatgggacgctgtgcaatatataaaagaaattttgcaaatagatacgattattacagctggggattctttacttgatttatgcatgcttgaaaaggcgaaccatgccttcgcaccacttcatggtgagttaggggcaatgcatgataacttacaaccccatattttaaaaacagacgcaattggcatatatgctgcagaagaaatcgtaaataaatcacttcaaattattcacagttcattacctaccccatgatcataatatgcacaattgcatacgcaccataattaaacaagtggtacaatttatttgaatcgctgttgctacacttcttgattaaagaaaaggcgttaacacggaaattagcgtcttatcaacctcaagcaattggcacattttgtcatcttaaaagacactccaacgagtgtctttttttctatatccaacaaggacttactcatttcaaagtataaatacataaaataatgtaaatcattacacgcatgaatcactttctaaaagttataaagtagattcaaaataaaaaagcactcttaactagagtgctttttactttcaaacaaggaggctacatatatggatagcactctcgtatttaatttcggcatcgggcttgtcattattttatttgtcttctttgtactttgtatgagcggggtataaaaaggcgattttcgggcgtctttttatacatacatatgtattacttgacttctacaaaaacagtaaccataatagttacagatatacaaataactattcacatatccacaaataggaggaagaaaaatgaaacatgtaatcgtttatgcacacccgaatacagaaagcttcaaccatgcgattttagaaacggtaaaaagtgaattagaaggaaaaggtcacgaagtacgcgttcgcgatctatacgaattaaactttaatccagtattaggcgcttccgatttcatctcattttctaaaggaaatacaccagaagatattaaagaagaacaagagcatatctcttgggctgatagcattacatttatttatccagtttggtgggcgggacttcctgctattttaaaaggatacgttgaccgtgtgtttagccatggatttgcttatgcttacggtgaaaacggtattgaaaagttattaagcggtaaaaaaggattgttattatctacaatgggcaatacgaaagaagcatacacagcaggcggcatgtttgatgcgatgaagaaaacagcggatgttggtatttttgaatttacaggcattgaaacaattgagcatacattctatacaagtgttccttctgtggatgacagtgtgcgtaaacaatatcttgaagaggttaaagacgttgtgaatcgtgctttttaataaaattatatcagtgattttctaaatatatcagcgcaactcatattatatcagcgattttctaaatatatcagcgcaactcatattatatcagcgattttctaaatatatcggcgcaactcatattatatcggcgatttttcaaatatatcgacttaccgacaaaaatcgacactagtcacaactgaatgttagcccacaccaatcgggctgcccgcaaatattagaaaaaaagctgttccaaagtttggaacagctttcttcattacatcttctcaatccactccgtcaagttatgcacaacttgcgttggttgtacttcatattctgttaacttctccacagttgtgactccagtgtggacaagaagggtatgcatgccagcatttactcccgctaaaatgtctgtatcgtagttatccccaaccattaatgcttcatttttttctatgccaagcacttttaaagcttgttccataatgattgattctggttttccgataaagattggatccacacctgtcgatactgctacaactgatgttaatgaaccgttacctggtaataatccgcgctcagttggaatggcaatgtccccatttgtagaaataaacgttgcgccgttacgcacagcaagacacgcttttgctaatttttcatatgtgatgtcacgatctaaaccaacaacaacgaaatcaggattttcatccgcaagttcaaatcctttttccacaagtgcatcatgcaagccttcttcaccaatcatatatacagttgcgtcttgtttacgttcataaatgaagttcgcagtcgccatactcgttgtgaatacttgctctgctttcgctggaatatcgaaacgaacaagtttttctgccacttgttctggtttacgcgttgagttattcgtaacgaataaataaggaatgccgcgctctcctaatgcttttacgaagtcgcttgcctcttcaatttgttcttccccgcgatacatcgtaccgtctaagtcaattaagtaacctttatacatcgattatgtctctccttctatgctaacgttctcaccttatcataccactcttatattacccgctttttccaaagaaaaaaacgctttacctaaaagcgccccataacgttcattttttctcttttacttggtaagaacaactacaatcgccctcacacatatttgctaacgtctttacatctgctcctgcaaataaacgcttatacatctctttttcatctttacatacttgcgggaatctctctgcaatttcctttaacggacagttttgtttttcaattacgaaagaattctctccatctctctttatttgaaccatataaccgtttttctcttgcatagctgctatctcttgcactttatatgctaaattcttttgattactcactctcttttgtaactgttcttccattcgcttcgttctctcttttaaaacgtaacgaagtattttttcatcacccattcgagctaaatcttctagcatatcaatcgcaaattgcttatactctttcgggaatgtatcttctcccttttcacttaatccatacaaataagttggtcttccgacatgttgccttaccatcttagaataaatgagtccgtctttctcaagattacttaaatgtcttcggatcgccatttctgtaatctctaaaacgtcagctagttcagctaccgtgtgctctccctttactttcaacaattgtacaatttcgtctttcgtcgtacgtgcttcccccatacttcacccttctcccttttctttctcacatacaatataagatccccaaaaggcattctctggggatcttataagcataattattctggtacaaatgcagatacaggtcctaattccttttctaaataactgcgaatatttgctgggtatttctctaccactgcaatatgtttttgaatcgtcttatataattcatcatgattcatttgaatatagtcttgcgtaagcatttttcgaagaaggataatttctttcatcccttgtccatcttcttcacttatcactcgctcgtccattaaaatatcaataatatcttcatagcttcctggatcgcgcataataaatccatcaatcatcgcattcccggcatctaatacacaatcaataataagatgggctatgcgctctaatgcgtaaaattcaaactcggtttcatatatctttttctcttgaaatgtacttgttgctcgttctaaacatactagcatttgttctattttctttctgtctacaaaatacatgaatgtcacctacctggaaattaaagcatttacattttaattgtaacgctttcttctgaaaaaatcgacaatttttcgaattcaccttttctccgttatttgttatagttatatttgtatgatttttgaaattggaggaatggaatcttggaacgtgaactcgcactagaaattgtccgtgtaacagaagcagcagccttagcatccgcacagtggatgggccgcggaaagaaaaatgaagcagatgatgcagcaactacagcaatgcgtgatatgttcgattcagtaaacatggcaggtacagttgtaattggtgaaggagaacttgatgaagcaccgatgttgtatattggtgaagaactaggaacaggtaacggtccagaagtagacatcgccgttgatccattagaaggtacaaacatcgttgcaaaaggtcttgcaaatgcaatggcagttattgcaatcgcagacaaagggaaccttcttcatgctcctgatatgtacatggaaaaaatcgcggttggtccaaaagcagctggtaaaattagcttagatgatccaattgaaaaaacaattgaaattgtagcagaagctaacaataaaaagattcgcgatctaacagttatcgttcaagaacgtgaacgtcatcaagatattattgaccgtgttcgtgcaaaaggtgcacgcgtaaaattatttggtgacggtgatgttggtgcgtcaatcgcaacagcactacctggaacgggtatcgacttattcgtaggtattggcggagctccagaaggtgttatttctgcagcagcattaaaatgccttgaaggtgaaatgcaagctcgtttagttccaatgaacgaagaagaagaagctcgttgtcgtgaaatgggattagaagatcctcgtcaacttcttatgttagatgacttagtatctggggatgatgcaatcttctcagcaactggtgtatctgctggtgagttattagacggtgttaaattccttggtggagatttagctgaaacatactctatcgtaatgcgttacaaaacaagaacagtacgattcattaaaacgcatcaccatttagatcataaaccacacttaaacttagatatttaataaaggagccatgtgtatggaagaacgtttctttctgtacgacgatactgtcgctacaaaaactcgtttcgttagctttatgggagaaaatgagcgtcacgatttagcgctattatactccgatcgtcattacggtaaaacaattgtccttgatatgcaacgcaataaatttgcaatcatcggtgctgacgatttaaacgaaccaggctacttagagcacgcattttctatgactgaagaaattgcagaagaattacgctcatttttatttgaacttatataatttatcgtatgcaccagctattttagctggtgtttttttattgtaattatttttaattttcaaactaatatgttataattaagaataaatctatttggatagaaaggacgttatctacgtatgccaacatttactttgtaatggaccagcaattggatagcattactctcaaaaaagcaccacgctttttcaagggagtagtctgcccattcccattacaaaggaacgtaacgcatctgtagtatgatgtttacggaggttcctaagggaacctccttttatttttgtctttttctcatgtcttcatactacaagacatccaaatagctgtattacgtttctttgccactactataagaggtgaagaaaaatgcagaaagtacaactttcttggagtttatatgaaaatgagcaaaacacaatcgaaaagtattgtaaaaattgcagacgcactaccttatttactgacacgaatattcgtaggcataacgccaacggaaaaaacatataccgctttgccatttataaatgtccgaaagatcatacgtggaatcaaaaactgcgtatttataaatcatttactgatcacgttgaaacagtcgatatgacgcagcaagatcaagccgaaacaactactactatttccattatgcaacataaagaaaacggcatagctaaaatcacgatcgtattagacatcgttttcggttcccaccgcatcgataaagccttatccacatatatttccgactggagccgtacactcattgtggataaaattaaaaatggggatattcaattgaatggacaacaaatgaagccaaatacaatactatctgaaggagattctatttcaatttgtttataagggggagtctcatgctaaatgtgagaaaaggtacgatgaatttattagacgaattagatgcaatgtatacagaatgtaaaaaagcgctcttacaaaagaaaatttatcaatgggatgattcatatccgactcgagaacatattgcctatcacttagaacaaggtgaactctactgcctatttgagcatgattcgctcgttggtgctgttgtgttgaatgagtggcaatctccagaatatgagctaattgattggtcagaaacacacggtcgctttcttatcgtccattctttcgtcatccatcctttcgcccaaggaaaaggatatagcaaagtacttttatccttttgggaaaatgaagcaaaacgaaaagactatacgggcatacgattagatgctttcactggcaatcccgtttcattgcgcttgtatgaaaagaatcattatatttgtcgaggtgctgtttatttttcaagtaaacagcctcctcacaattggtataactgctacgaaaaaaaactcttacaatcgtaagagtttttttacttcttcacttttcgtaatacaaaatgtgcgcaaccgaagttacagtactcgtataaatactccgttaacgtactaattttcgtatcatatgtcgcacgctggttactatcatcaaagaatccgcgcagtctaagttgctcatatccccagtctccaacgatataatcatatttatttaaaatttctgcatagcgctctttaaatgcttcttcactaaaaccgtcacgaaagtttttaattacttcgtactgcacattattaatgctcaccgtagcatgaatctcttgcttttgctccatcattaacttcctctctaagcattcttctttttatcgtatcacaaagcataacaaccaacaatttcaaatacaaaaaattgaaaattagtgcatgctatggagaaggaggtgatacatcgtgaaaaaacaaattatactctctctcctcactctttccttatttgcaggctgccaatcaacgaataaagccgaaatggaacgtgaagaaggaagccgtgttcttgtttccaacaaaaacgacatgtatcatacggaaaatacaaatacacgattaacgagagtcggttattcatctaaacaaaagcatgaagtgtctaacaaacaagtaggggccattaaccgtgagaaagtcgctgaaatgattacaagcatgacagtcaaacttcctgacgttacaaacgctgctacgctcgttaccgatgatgaagtatttgttgtataccgtgcaaacacaacggatccaaaactcgtagcggatcaagtatatagagctgctttgtccatcgtccctcgctattataaaggatatgtatcaacagaccaaaagttgatttcccaaattcaaggtcttcaatctggcgcattaaatgatacagaatatacgcaaagcctcgatatgctaaaacgtgaaatgagtaaaaatcctcatttgaacaatacgggagatcagactttgaatgatatgattaaaaagtaaaacaggtggagaaaatctccacctgttttactttttattttttattacgattcgcataaacctccatcgcatcacacataaattgcgctaacccctcaccaaacttatcgatatttttcgtgaagcgctcatcagcgacgtacatttgaccgagtcctttaaaagcatctaatgaatatgcaccgaagttttgcaagtaatcgtaccacactccaattgcttcttgtgcctctttagaatctggtgctccgtgtctaagcgctgctaaatttctataaatagcattaaactcctcttggttctcttttgacataccttttgcatattcgttcgctttatctacagctgcatctccccatttttcacgtgcttcttcttcatatgggttatggctgaaatcgaatccttcaaatttctctttgttcgtcatttcaatctctccttttgtatgctgaattgttttatcaatcgtcgcaatcactttatctaatctagcacgcttttcaagaagcattttcttatgaagctctagtgcctcttcgcgatcaaatgatggactcatgataatctctttaatttttttcaaagggaagccaagctctttaaaaaacaaaatttgctgcaatgtctctaaattttcattggaatacagacgatatccagactctgtcgtctcgtctggggttaacaacccaatttcatcgtaatgatgcagtgtgcgcacactaattccaactaaatcagctacttcttttactctcattgtcatttgtatctcccccttagtacatacgataaagtatgacgcaacgttagagtcaataagtaaattcattttatcttaaaaagtttcatctctcctatatttgatgcataatagttatgtacatatattagaaagcggtgaaagtatggtttcaaatactgtaattgccagcatcatctttcaactcattgtctcgattctggtcccaattattgtactcgtttatttccgtaaaaaatataatatgaattggaaagtagtcggcattggtgttcttatctttatcggatttactcaaattcttgaaacaccattccacctatttatgcgcggtaatccaacaatcgctccatttttagaaaatccgtttgtcttcgcaatttatggcggattgactgctggtatttttgaagaattaggacgcttcgttgccttcttcttcttactaaaaaaatatctagaatataaagatggcttcgcttatggaattggtcacggcggaattgaatctattttaattggcggtttttctgcattacaagcattaatctttgctaattctattaacgatggtagcttcgctcgactgattgaacaaaaacccgagctgagcattttacaggacatgttaattcagcaacctgcctacttatacttccttggtagcttagaaagaattatggcactcgtgcttcaaattgcctttacaatgcttgttttatacgcagtaaaacagaagaaatatatcttcctagtatacgctatactattccacgcatttgtagactttttcgcggccctttaccaaacaaaaacaatcaatatcttcgttgcagaaggaattacacttctttgtacaattggcgctgtcgttcttattcgcaaaatgaaagcgaaattaatgagtgtaccggagtaaaaaataaaccaccgattggtggtttattttttatggattgtcgcaatgatgatagctttttccttcttgcagctccctctttgtttctgcatctataacgatatatttatgaaactcttctacttcattttgagaaaaggaagcaaaaaaataaacttggcgatcaggatgaacaaaaaaatcttgaagcatcacactactccgacaacccacggctgttttttgtaggaaagaaaattcttcatcgggcacttctttaaataagatttttttcgaacactatatgctgcattattgtattctttataaattttcttatctaactgtttataaaaaatatcctcactcacaaatgacttatttcgattgcttggataatttactttttgattcgactctgcataagttgtggacaagtgtataaaaaaaacaaagactaactacaatacatatcattttattcatgattgcacctcaaatgttcattatccacattacttttccacatatttaaatccatatgccgttttacaagaaaaaggaattatttccacatttgtcgaagtatatagcgtcaacttgaaagatggggatgaattatgaagaaaattattgtaatacgacattgttcagcaactgggcaaaaacgtgatgctgaattaacgaccgatggaaaagaccaagcaaatacccttgctacatttctcttagaaaatcatctacaaatcgatcatattatttcaagcccatttgtccgagctatcgattccattcggccctatgcgctccaagctaacttatctatccaagaagatgaacgattaactgaacgcatattgagcaacgttccaatggatgattggatgcaaaaactagaatctacttttacaaatatagatattgccttttcaggcggagagtcaacaaaacaagcaacagaccgtgccatatcgcttattcaagacgttttacaattaaaccatacaacaacactacttgttacacatggcaatttacttacgctcattttaaagcattttaatcatacgattggctttaatgaatggagaactttaacgaatcctgatatttacgaaattacaatcgacgaacaatgtatcataaaacgcttatgggaagcatcgtctaagtaatatccctttccaaaacattcagttgacgccacgagaagaaactgtactaataatagaaaggggtatcactccatatgtacgaagatgtacttgctctactacataaaacaaatgtttcttatgaaaaatttgaacacgaaccagtactcgattatgagacagatcggattgtacgtgagagactcggcttacaaggcactccaagtaaaagcttatttttaaaatcaaagtctggagattattacgtattttttacgttagagggcacaaggctcaaccggggagagatgaaagaactaacaggagaacgcttatctctctgttctcctgatgaactgcgagacaaaactggttgtacgccgggatgtgtggctcctttcggatattcacacgatgtaacaattattgtggataacgctatttatacgtacgataaaattttaattacacctggtgtacctgaatttacaattgaattatccacagaagaattaaaaaagattttattaacatgtccaaataccgttttagagtataaacaaaaagagagctaatcgttagctctcttttttcattatttagcttctgctgttttttcttttgcagaacgtacttgctcatccgcatggtaagaagaacgcacaagtgggccagcttcacagtggctaaatcctttgctaagtgcaatttctttaagctctgcaaattctgctggtgggtaatatttaagaactggtaagtgcttcttagatggttgtaggtattgcccaagagttaaaatatccacattgtttgcacgtaagtcatccattgcttcaattaaatcttctctcgtttcacctaagcccaccataatgctcgatttagttggaatatcaggctgcatttctttcgctcgacgtaaaaactctaatgaacgttcatattttgctctagcgcgaactcggtcagataatcgacgtactgtttcaatgttatggtttaaaatatctggttttgcatccattaacatttttaagttttcttctactccacccatatcagatggtaatacttcgatagacgtgaatgggtttttacgacgtactgctcgtactgtttcagcaaaaacagctgctcccccgtcctttaaatcatcacgtgcaaccgctgttataacaacgtgctttaagcccatttgtactactgaatctgccacgcgttctggttcttgtaaatcaagctcagttggtaagcctgttttaaccgcacaaaaacgacaagcacgtgtacaaaccgcacctaaaatcataaatgttgctgtttttcttacagcccagcattcatgaatattcggacattttgcttcctcacaaactgtatgaagatttttagaacgcatcattttctttaagcctgtatagttttcattcgtgtttaacttaattttcaaccattcgggcttgcgcttatattctgtttgttttgtcatggttatcaactccgcacaatatgaaatagtttaccgtgttcgcttctttcaatgtaacatatctattctaacgtatgaaagcgatttgctcaaatgaagattctaagattttttccaatcgttccctataatgaaatactccgtatatcccacactaaaaagagtgatgttgtgaaaggagtctatttcatgcttcgaaaaatttctcttttgctttctatttgttttcttctccaccaaaacatcgcttacggtgaagataatcagcaaagcatatacgaaaagcgcatggcactatataaagaaaccgagcagtcttcaggcattccatggtattacttagctgcaatggatcaatatgaaagaaatatacggagcgtaagaaaagatattccgaaaaaaccagatgccatcatttccctttatttcaaaccagaaatatgggctggacctattaatagtaacgatactcttccccatacaatttctctatttggcggaataggtttagatggtgacaaagatggatttgcaaatgcaaatagcgaccgtgatcttctgcataccgcagcgactattttaaggaaacaaggaacatcagaagaccgtattaaaattatgctctgggaatattatagacgtgccaaaacagttgatttaattagcgaatacgcccaaatttataaacattatggacgtattaatttagaaggaaatgcttttcctcttccgatccgtagtgaccatagctaccgtagtactttcggcgctggaagaagttttggcggcagaaggattcatgaaggaaccgatatttttgccggatatggcgtgccagtaagatcgacttgctatggcattattgaaacgaaaggttggaaccgccttggtggatggcgcattggtattcgcgaccttcataacaattaccattattacgctcatttaggcgggttttcaaaagaaatacagcttggacaaattgttgagccagggaaagtaatcggatttgttggtagcactggttatggacctcctggtacagccggaaaatttccgccccacttacattttggcatgtataaagacaatggctatacagaatgggccttcgatccatacatgcatttaagcctttgggagcgcaaagaacgagcaaatacaaaacgataaccgtagctgcattgctacggttattttttatccagtaaaagcctgactgagccgagtttcactttatttacaactaactatctgttttctttttatcaggtacagcaacacttccgcttccataatacgtaggcacttccccttgaacgatacgcgtcgcaatcggaacattttgtttcacctttatctctttcgtatgaaatggaataatcacttgcaatgttacttccatttccataacaatttgaatcgctgtagtattaatcccatgcggctcaattttttgtttaatatctgtattcacatgtccaactggcgtgaaatgaatcggaatatctggtcctatattaccaagaagtgcattatcagttacacgcccaaaaggaactgccatagtcgcgccgtttttttcagcaatacctagctccttcaacttcccttgttctacttgctgcaaatatttttctatgtatgtggtcgttgatgttacgatttcatttacttgctttgtatttaaattaattgtggatacttttccgtttttatcattctgtactttcattaatgaatctacatcgaatccttcattaattcgatcctttactgccttcgtcataattgccgtcgccattttatgtgtctctacttccccatatttaattaaggtcggctgaatattattattcacaatccacaacccttgcgtaagtaatataacaaaaagaataaacgacataagcagtatataccgaaaggcaataggtccccttcgaaaccgcgagtttttcgagcgaaatatactcataaaaaaacctccttcttatatcatttctatgcaagaaggagggacgatatatgcttatctcatttttaataatgcttcttttccaatcgtacctgctggaatgcctaatgcttcagctccagtcgttaccgattctagtggcgcttcaagaagttgttcaatcgttcttacaccaaccgcacggccagcaataattcctcgatcacctaatttctcatttaaaagacctacatctaatgcaccacacataatatatcctttatcgctcattacagctagcaaattcgtctttggaagtttcacgctaactgcaataaacgtataattatcaattataattggctccacattaaccatagttcacactcctctctttcttatctgtatgacaagagaaaaatgagtgttacaagttaactagcctatagtttaacggaagatgtataagttattaacatatctgttaacacatctctaagtagttctggcatataatattgtttgtcagaaagtgtggatagctctgggtataagtagccaaatgtaaacatatcaatcgttcctactgtatatatacgatctaattccagcgattccccgttaattaatacatcttcgagtaaaattttattcccgggaatcgtatctggaatgacttctacaccagcgtaaatcattttccccatcacttttccccgaaatccgaatcctttcacctcaagattctccatattcggcttacgtgctttcaaaataacttctcttaatatctttcctggaactttcaaagcacacggattaattggatgtggacaaattctgtgaatatctccgcgcgttacaacaccctcttctaacccttcaagaagtacaccagcgttcaccatgccaatctctgcattgcaccatgttttcagcgcacttgctaacatgtgagaaaacggcgtctcatgaaaccaatcaaccggtaatgactcttttaaatgaacgacagactctgccattatatgctcactttcttcctgcagtatttcaattgtggataacggctcgctataagcacctaaccgttccgtcttaatcgccctaccgtcttttttcagcaatttcttcatctctatatccacagtaagctgcacgtgaccaacgtaacgcccccacttttcacaacaacaaagtaaagtattattcagtagaataccacgctcaaataaatgatgcgtatgtgctcctaaaataacatctatatcataatgctctgccatatactcatccatactttttccaaggtgagaaaggacaaccgtaatatgagcctcatctttcacttcttctaaaatagactctaaatgaataatgggatcttcaatatgccaatcgagcatctgataaaactctggataagctaccgttaatccgataaaagcaatggtaatcccatccgtcgttgtatgcaatttataaggccttgcccatgacggacgtaccccttctttttcaaataaatttgcgacaagtatttcaaatccagcatcatcatagagccgattcaaatgctccttcgctaacgtaattccttcattatttccgatcgttacataatcatataacgcctcattcaaaagcttcgtattcccaagtccattcgtcgcttccgaaatactatgaaaacgatccacatgatcgccgatatcaaccgtcaaaacagtctctcccgcttcctgtcttcgctttttctcccctagaacaaaccgagaaatttgcggccaattttcaaaatgactatgtatatcgtttgtatgataaaggtggatgattgtttctttatttgtattcagagaaaaaacctcctctcagttccttactgccatttacgctatgcgcacacaataatcctgtaaatacttttcgtcttttcttgctattttacattgtactcgcattgtgagaaaaagcaaaagattgtcctttttatatgagaaactttatttttgccagtgtggggatttgttggtagagcggggatttgtcagaaagttagccgtggggattttcccataagttctttgctgcatttgtcagtattttaatctaaattactttcagttgccctctttatgtataaatgctcctttcctttttgaagggtacggggtattcgttcctcttgctatgtcgtaatttgttgataagtcgatatcccttgtcgaatcgtcgatatattgaaataatcgctgatatatttcgagttatggacgatatatttgaaaaatcgctgatatatttaactgaacacccacccgggtatcctctcccaagccaagacaaatccgcaaaacaaaaaagcgccctgcacagcagggcgctttcttcatacatatattatccagctttgcctcctagaccctcatgtctaagaaccttccgcacgagaagataaaaagcatcttctgtgcgaaagaaccttagccaacgggtctgaacagtcggctccgcatttctatttaaccaatagaaccttccatctcaaacttgattaggcggttcatttcaactgcgtattccattggaagttcgcgagtgaatggttcaatgaagcccattacgatcatttctgtagcttcttgctcagaaataccacggctcattaggtagaataattgttcttctgatactttagatactttcgcttcgtgctcaagtgaaacgtaatcgtttttgatttcgttgtaaggaattgtatcagatgtagattggttatccatgattaacgtgtcacactcgatgttagagcgagagtttttcgcttttggtccgaagtgtacgataccacggtaagttactttaccaccatgcttcgcaatcgatttagaaacgattgttgaagacgtgtttggtgctaagtgaatcattttcgcaccagcatcttggtgttggcctttaccagcaatcgcgatagataatgttaaaccacgagcgccttcgccttttaagataactgctgggtatttcatcgttaatttagatccgatgttaccgtcaatccattccatcgttgcgttttcttcacaaaccgcacgttttgtaactaggttgtatacgttgttcgcccagttttggattgttgtataacggcaataagcatcttttttaatgatgatttctactaccgcactgtgaagtgagttagtagtgtaaacaggtgctgtacaaccttctacgtagtgtacgtgtgcgccttcgtctacaatgataagcgtacgttcgaattgtcccatattttcagagttaatacggaaatacgcttgaagtggtgtatcaactttaacaccttttggaacgtagatgaatgatccaccagaccaaactgcagagtttaatgcagagaatttgttgtctgttggtgggattacttttccgaaatgttcacggaaaatatcttcgttctcttttaatgcgctatctgtatctttgaagacgattcctagagcttctaggtcttctttcatgttgtggtatacaacttcagattcgtactgtgcagatacaccagctaaatatttttgctcagcttctggaatacctaatttatcaaatgttgctttaatttcatcaggtacttcatcccaagacttctcagatttctcagatggttttacgtagtacgtaatttcatcgaaatctaagtcgtttaagtcgccgccccattgtggcattggcatttcgtagaacttatccagtgattttaaacggaagtctaacatccactgtggttcttctttcatacgtgaaatttcttcaacgatttcttttgttaaaccgcgtccagcacggaaaatcgaaacgtctttgtctttgaaaccatatttataatcgccgatatctggcagttgcttcgccatgttggtgtgtccctccttagataacctcgtttttaggaacctttaacattacttatcttcgtttaagcccttttctaacgctttccacgctaatgttgcacatttaatacgtgcagggaacttgcatacgccttgtaatgcttcaatatctcctaaatcgatgctgtcatcgtactcttttcctagcatcatgtcagagaaaattttcgaaagctgaagtgcttcttcaattttcttaccttttactgcttgtgtcatcattgaagctgaagacattgagattgaacatccttcgccttcaaacttcgcctcttgcacaataccttcttctactttcatcgtaagttgaatacgatcgccgcaagttggattgttcaagttaacggtaacactatcttctaatacgccatggttacgaggatttttataatgatccataataacttgacgatataacgtatctaaattattaaatgacatttgtgaaatactcctttgtcttgattagcgagtcaacaaatgtatcaatttcttcttttgtattatataaatagaagctcgcacgtgctgttgaagaagcttttagccacttcataagcggttgtgcacagtgatgtcctgcgcgaactgcaatgccttctacatctaatacagtcgctacatcgtgaggatgtacgtcttcaatattaaatgtaacaagaccagcgcgatgctttggaccataaattgtaacgccatctacttctgatagtctttctaaagcgtattgcgctaattcatgctcatgcttttcaatattatcaagaccgatttcttctaggaaatcaattgccgcaccaagtccgattgcattaccgataatcggtgtacctgcttcaaacttccacggaagctctttccaagtagattcttgtaaatctacgaaatcaatcatttcaccaccaaattcaattggctccatattgtttagcaattcttttttaccatataatacgccgatacctgtagggccacacatcttatgagcagataatgcgtagaaatcacagtttaaatcttgtacatctactttcatgtgaggtgtactttgtgcaccgtcaacgaccataattgcgccattttcgtgtgcaattgctccgatttcttttacagggttaatcgttccaagtacgttagaaacatacatgatagaaacgatttttgtattcggtgtaattgtttgacgagcatcttctattgaaattgtcccatctggttgaagcggaagatattttaaagttgcaccagttttcttcgcaacttgttgccacggaatgatattactatggtgctccatgtaagaaataacgatttcatcgccctcttttacattttcaagaccatagctagccgctactgtatttaatgcagttgtcgttccgcgcgtgaaaataatctcttccattgatttcgcattgataaacttgcgaactttctcacgtgcaccttcatacgcgtcggtagctttcgtaccgagcgtatgaacaccgcgatgcacgttagaattatattctttatagtaacgttctaacgtttcaatgacttgaattggtttttgagaagttgctgcactatcgaaataaacaagttgtttgccgttcactttttgatcaagaattggaaactgtttgcgtatttcatgaatattcattagcgaactttcctttcaattacctcaacaagctgtgcctttactccttcaattggaagctcattaactacaggtgctaagaatccatggatgactaaacgttctgcttcgcgttttggaataccacggctcatcaagtagtatagttggactggatctacgcgacctactgaagctgcgtgacctgccattacatcatcttcgtcgattaaaagaattgggtttgcatcaccgcgagctttttcatctaacataagaacgcgagaagattgttgtgcatttgatttagatgcaccgtgttcaatcttaccaattccgttaaagatagatgttgcactatctttttgtacaccgtgttttaaaatccaaccttcagaatgtttaccgaagtgaacaactttagttgtaaagttttgtgtttggttgccacggccaattgttactgttttcgtatcagcatatgaaccgtcgcccattaagttcgtaacgttctctgaaattgtgtttccgtcattcataaggcctagagcccaatcaatacggccgtcgcgtcctacaacgccgcggcggttaacgtaagttgttacgtcttttgctaatagatcaactgcaccgaatttcacttgtgcgccttgttccacgattacttctgctacgatatttgcaatacctttagcattttcatttgcaacatagttttctacataagttgcagtactgttcgcatcagctacgaatagtacgtggttatatacgttagcttcttcgccgtctactaagaatacagcttgaagtggagtttcaagaacaacgtttttcggaacatatacgaatgcaccaccgttgattaatgcagcatgaagtgcagttagacgatgctcgtctactttcacgccgtctttcattaagtacttttgtactagttcagcatgctcagttgctgctgttacgatgtctgtaaaaataacacctttttcttttgcttcgtctgctaaagaaacgaatgcagttgtaccagtgcgttgtactaatacgctgttattttcatcgattaagtttttcactgcttctggaagttcagttaaagaacttacaggctcttgcttagcagcgtcgccttttccgataaagtcccatttgtcaattttcgttttatcaggcgttggcattggaagttcagttgcttgtgcaagagcttgtaagcggaactcagtcaaccaagcagcttcgtttacttcgcttgcgcgttgacggattgtttcttgatcgaaaggtaatgtaccgattgtcatgtttatgctcctctcttacgcttcttgctctgttgtttcgtcttcaatacctaattcttttttaatccagtcgtaaccttcagcttctagacgttgtgcaagctcagggccaccagatttaacgatacgaccgttcatcataacgtgaacgaagtctggagtgatgtagtttaataaacgttgataatgcgtaatcattaggcaaccgaactcttcgccgcgcatttcgttaatacctttagatacaacttttaatgcatcgatatcaagacctgagtcgatttcatctaagattgcgatttttggctcaatcatcattaattgaaggatttcattacgttttttctctccaccagagaaaccttcgtttaagtaacgttgtgccatttctggatccatttctaggaattccatgtttttatctaatgtacggataaatttcataagagaaatttcatcgccttcttcacgacgtgcgttaattgcagaacgtaagaagtcagcgtttgttactccgctaatttcacttggatattgcattgctaggaatagacctgcttgtgcgcgctcgtctacttccatttctaatacatcttcaccgtcgatgatgatgctaccttctgttacttcatactttgggtgacccataattgcagaagataaagttgatttacctgttccgttaggtcccataattgcgtggatttctccaccttttacttcaaggtttacaccctttaaaatttctttgccatcaattgatacgtgtaagtctttaaccgttaatgtagaaccagccatctcaatacctccattaatcctatatatacattttaaaaattcctaaaacgttcatattctcattttattctcattctaattttatatcaaataaaatgatatcgcaaacgacgaaaaaaagtaaccgttttttcacaaatgtatataagtatttccttcacatctttctatgatacacctttcttcttatttatataaagaaaaaaggactggtaattttccagccctttccttatatttattcacttaccggaagtacagcacctttatattctttattaataaaatcttgaatttcttttgaatgtagcacttctactagctctttaatttcttttttcttctcatcacctttacgaactgcaatgatgtttgcatacggagagtccgctccttcaatcgcaattgcatcctttgttggatttaattttgcatcaattgcatagtttgaattaataaataaagcatcaccttcattattttcatacagctttggtgacaatccaggctctacatctgttttaaactttaagtttttcggattttcgactacatcttttactgttgccttaacaacatctactccgtcttttaatttaataacgccgcctttttgtaacagtgctagcatacggccacgctccgctacgttattactcataatcactgtcccgccatctggtaagtcttttaagcttttatacttcttagaataaatacccatcggctctaaatggatttttcctgcgtttacaattttatatcccttttcttgaatttctttatctaagtacggaatatgctggaagtagttcgcatcaatttctttatccgctaacgctttatttggcagtacataatcctgaaactttttaatctctaacttaatgccttttttctctaatatcggctgtgccttttctaaaataacagcgtgcggcacgttagaagctcccacaacaagcttattctcttccttccctccgcaagcagctaatgtaaatacagataatgctgtaacaactgacaatagaatctttttcatatgacgtccccttctccctatagttatgtagtaaaaaaggaccggcatacaccagccctttttcagcaattattcttttacaggaacaactgcacctttatattctttagtaataaagtcttcaatttctttagaatgtaatacttctacaagctctttaatcgcttttttatctttatcacctttacgaaccactagtacgtttgcgtatggagaatcatcgccttcaattgcaattgcatctttttctgggtttaatttcgcatcaattgcatagttcgagttaattaaaacagcgtcgccttctttattgttatacacttgtggcaacaaaccaggctcaatatccgttttgaattttaagtgtttcggattatctgcaatatcttttggagttgcactaactggatctactccgtctttaatttttaaaatgccttctttttgtaaaattgctaaaccacgtccatggtcagtaacggaattactcataataattgtcgccccgtctggaagttcttttaaactcttatatttttgagaatatacaccaattggttcaatatgaattttccctgctatttcaaaatcatattttttatctttaatttctttttctaaatatggaatgtgctggaaatagtttgcatctaattccttatccgctaacgatttatttggcaacacgtaatcttggaattttttcacttctaattcaattccttttttctcaagtaacggttttgctttttctaaaatttcagcatgcggtacgttagaagcaccaacaacaagtttcttttcatctttatctttcccgccacaagcagctaacccaaaaattgaagttgaaataagtgccgtaagtaataattttttcatttaaaatatcctcccgtttttattatcgtttatctattcgagtcgttaaactatcaccaatccactggattaaaaatacaactagtaatacacaaattgtcgcaacgattgttacatcgttattccctctctggaatccttctaagtaagcaagtgttccaaggccaccagcaccaacaactcccgccattgctgtatagcctactaaagcaattgtcgtaaccgtaataccagatactaatgctggtaatgattctggaattaacactttcaaaataattgtgcttgtttttgctcccattgcttttgaagcttcaattacacctttatcaatttcgcgaagtgcaatttcgaccattctcgcgtagaatggtgcggctccaataattaaagccggcagagctgcacttgctccaagaattgttccaagaagaatctttgtaaatgggattaataaaataattaaaatgatgaacggtatagagcggaatatatttacgaatgctccaatcaccgtattaattgatttgttttcccataaattatcttttgctgtcatgaagagtaacaatcctaaaattagtcctaaaacaaatgtcgcaagggctgcgattgccgtcatatataacgtttcaccagttgcttctaacatttgattccaatcaacatttgcgagtaacttatccatgtgcaatcacctccagctctacttgatcttgatgaattccttctattgcttgctggatcgctgtttcctcaccatttaaatgaacaactaaactaccgtaagaaccgttattcgtttgtgcaatatttccttgcaaaatgctaacttctatatcactgcgttgcattaatcgttgaagcactggtctttctacagcctcaccgataaactgcaaacgaattacttttccatctggatatttttcaattaaattttcaattgtttcatttgtatcttcagaatctgttaactgctgtacaaatcgtttcgtaatatcttgcttcggattacggaatacatcaagtactggacctgtttctacaatctttcctctctccattaccgccactcggttacaaatctttcgaatcacgtgcatttcatgtgtaatgagtacaattgttaaaccaagacgcttattaatgtctaatagtaaatctaaaatttgatctgtcgtttccggatcaagagctgacgttgcttcatcacataaaagcacttgtggattgttagctaatgctcttgcaatcccgacgcgttgcttttgtcctccactcagctgagatgggtacgcgtctcctcttccttctaatccaacaagatgaattaattcatcaacacgttttcttctcttcgctttatcaacacctgcaatttcaagtggaaactcaatattttcacgtacagttcgtgaccaaagtaagttgaagtgttgaaaaatcattccgatttcttgtcttgccttacgaagttcacttcctgtaattgctgatataacacgattcgcaattgtaatttggccagaagtcggtttctctaactgattaaacaatctgattaacgaactttttccagcgccgctatatccaataacaccaaatatttcgcctttttctatttttaaattggcgttatctacagcagtgacatcaccgcttttcgccttatatattttctttacgttctctaatagaatcatgatgttcaccccttttttgtttggatcgactccgcaattttttatttttaatgcgtgtagtccaatgttatcattacttttattatttgaatgtcctccacattcaaacaataaaaaaacctttctgctttagagaagcagaaaggtttatatgcgtatataacaacattatccctctctctcatctctcaaagcattcgctttgcaggaattggcaccatttcaacataagttgacggttgccgggcttcacagggcacagtccctccacctctcttgataagagaaatcagattcaattttcgtctgatttgaaatttatgaaattgtctatattttatgacttgaattgtatcaatatacactcaccatgtcaacagaaattttcgcaaaaaatgaaacttcagaattttaagcacctactgacatcggtttacatatatgaaacatcgattccactaataacatcgttcggtacgttcctgaatattgtacacgtccatcgttcattaacatttgcaatcgtacatttccattcaccaattgttctatatccttttcatctaagcaaatgatttgttccgttcctctttcctcatgtaccagctctatataatctcttgaaatttgtaacgaacaactttcatctccaaagcgaaaattaacagttttttcttcttgtcttaaaagcggttctaaatgatattgaccattagcgtaatttacaaatgattgaagcaaagaatataatctcaccctaaatcacatccttcatatcactttctattacataccattccctctcactaaagagcaatcctgttattttcgctcgacaaatactgtatccaccctgcatctcgacatatttcccaagaaatatgtcgaggcggcaaaaattttgccgcctactttaattccgtatataaatattcaaccgaatgaaatgcgtatatcttcttcatcagtgtcccattttcaaaaacaagtaaacaaggtacactttcaatcccatactctttcgctaaatacggagcataatttaaatctaacatcccaattttgaggccttcaattgtcatctcaacaactgttaacatcttttttgctaattggcatgttccacacattggagtatatacatataatactgttttttcttcgttctctattagggctgtagcttcggctcctgtccaatcaatcacttctatcattccttaccgtaaatattctgtataaacgtcaatgtcggctccccataatacatttgctaagtgtgtagatggcgcagttgccacttctcggtacgagcgatcaatatagatatgctcggcttgcggaaattcttttcgaaattgtttccttaacttttctccagcatcatcagcatccactagcacatacacttccttatcaaaaaactgatcaacgagctcatccattttcgacaaaccaattgtaccatttgtacaaacaatttccaccggttcacgaataatagattcaatctttcttctatctgatgtaccttctacaataatgactttttctacataaatcatatgtcatcacccgatcaccatatactatataaccttgaacttagtatatagtatattcgttattttcatgttgtttcctgtttatttttgcaaaagaaaagcggaagcggctcgtttagaacaggagggcattggaactcctgaactagaggcgccttttgcctcaagtgaaggagtgaaatgaccgactgttctagccgctggagctagacaacgaaaagcggaaccgactgtttagccctgttggctaaggttctttcgtacagaagacgctttttgtcttctcgtacggaaggttcttagacatgaagggctaggaggtggagctggacaatgaaaagcgcaagcggctcgtttagattgtgaagacttatgaaaccttaccacaaaacagtttttctcataatagcttatttatttacatataacttgaatttcattatttcacacaaaataaaaaaggacagcacaaaggctgtcctttagtcgactacaattagtcttggtttgtcatttctgcatatttttctgcagttaataacttctcaacttggcttgcatcagaaagttcaactttaaccatccatgcaccctcgtatggagattcgttaacaagttctggttggtcacttaattcttcgtttactgctacaactttaccgcttacaggtgcgtataactcagaaactgttttaacagattctacgcttccgaatggctcgtcagcttcgattgttgcacctacttcaggaagttcaacgaatacgatatcgcctagctcaccttgtgcaaagtgagtgataccgataacaacttcattaccttcagtttttacccattcgtgttcttcagagtaacgtaaattatttggaatgctcatgactgtacctccagtgaatgtattaattatgtaaaaataccttattggtactttttccacacactttcaaactgctcttcgttaaaaccaagtgttacattcgttccatctgttacaattggacgtttaatcaacatgccatcagatgctaaaagctcatacatttcgtcttcgcttgcatctttcaacttatcttttagaccaagttcacggtaacgcattccacttgtattaaagaatttttttaatggtaattcacttttttcatgtaaattacgtaaatcttcttttgatggtggattttcaacaatatgaatcatctcatatgctacatcgtttgcctcaaaccatttctttgccttttgacatgtgccacactttggatatgaataaaatgttactgtcataaattcacctacttttttactaacctttacctttatcatatagaaaacgttttgttatttcaaaccattattcgctaaacttttacttatttcgtgataatttttaataatcctgcgaatttttcttatttttccgccatttgttaagaaaaaaataaatatataaattttttagattctgcaccaaacatatatcttaaacaagcgtttgattaattctccatttttctttcttaacctttgaactacaggagtttcttcctaccgaacatacagcttaaacaaacgtttgattaattctccatttctctttgttaaccattgagttacatcagtttcttcctaccgaacatacagcttaaacaaacgtttgattaattctccatttctctttgttaaccattgagttacatcagtttcttcctaccgaacatacagcttaaacaaacgtttgattaattctccatttctctttgttaaccattgagttacatcagtttcttcctaccgaacatacagcttaaacaaacgtttgattaaaaaataagaagcctcgtttacaggctccctcatcatctattcaaataatctgcgatggtttgaaatacgacgatatacatattatgaatactttcttctgtatttccaccattagataaaccaattgcccattgttgcccttcaccacttccgatatttgcaaagccttgcgtatacatagcatttacatcttttcgtgcactgttatactctattccttttgtaataaaaattgaatatgatttatcttgtaaaccgataaaaaacactggtttctttagcgatgaaaatacatttttatactgctctgttgaggcttcttgaaagtgatctttcattattagaaaaccatccacttccttagatttcttttccagttcctctaacttcatttcttcaaactttacattcctaaacgtatctttcggcttttctccaacaactccaattacgagtgctcttccgttatattctaatttctctcctgctttatcctttgcacacccagcacctactaggcatatcaatataaaaaataagaaatacgataaacgcttcatttagcaccctctccttctttttagtcaagtgacaaaaacgtaaggttaattcaagaaaatgtaagtaaaatcgatagcccaattcacgtttctatattataatcaattgaatttacttacattactaaacataggagatcaacatgaagaaatttaaactttcatcttttcttccgttaagttatatacttctactcgtgctcgtaagtcccctttacgacgtattaaataaatcgactgttcacgcagtagacgttacaactgtagtagatgattggattccatttgtaaaagcatttattattccttatttactttggtttccatacttatacggcgcacttatttattactgctttgctgaccgaaagcaatattatgtcactttaagtagtgttatttttggaaagcttgcttgtttttctatttattatttttggcaaacaactgtaccgcgtccgactgtcgttggaacagatgtattttctgaactagttcgctatatttatagtatcgatcaacctgtaaactgtttccctagcattcacgttcttactacattcgtaattatgttagctgcctttaagcgtagagaacagcatgcttttgaatattacatccttactttcttcggtacacttattattttatcaacgctatttacgaagcagcatgcctttgtagatgccgtttctggaatgacgcttgcaagcatactttacttcggcgttcagctcttattggccaaagaaccgataagagttccagtaaaacaaaatcatagaatgtagcatgacaaaaaagcagactgtggcttctcagtctgcttttatctattagtaaggagattttcaacttaagattgcggtacagtcatatcaccagagtgaatacgacctgcttttttaagagcaatgtaaagtatataagaaacagctactggaatgacgatataagtaattaccatcgccgggagaacttcccatccttggctggaaattaaattaattggtgcgataagagaacttaatccaagacctgcaatttcctttcctgcttccagttggaaaattaatgcggatactggaccgactatagcactggcaacgacagttgggacgagaatcattggatttttagtgatatttggtaactgtactttcggagtacaaagtgcttgagctaatatgccacctaaattattttctttcgctgagatgacagagaatccgataaactgagcgacgcatccggcaagagcagcaccacctgcaacaccgtctaagctaagtgcaattgctaacgcagctgatgaagctggagagataagtaatagtccccaaacgactgcaatgacgatagaagcgatgaatgggctaccagctgagctatctttaataaacgttccaactgtatttaaaacaggagtaatattatgagataaccaaataccaactaaaccagaacctaatatggccgcaaatggaacgagcatcatatctaacgcagtttttccacttaaacgtttaccaatatatacagctaaagttgctgttaataatgcaccgattggctcacctgttttaataattagaccagcttcagtaattgaaatggatccggcaccaattgctccggctaccatcgctgagaagattacaagaccgtttgcaccgagcataaaagcaattccggcaccaattgccggtgccattagtgattttgcaacaactccgattgtaataagtaatggtatatcaacaattcttcctatattttcgatcagtaaaccaattccgagggatacgaaaataccttgtgcgattccagcagatgctttaaatacacgagacattatatattccttcatttgtttcaccttcttctataagttagtaaccaattgttttcatataatcacgtaaaatatcgtttgattttgcgaatcgagattcttcatcctctgttaaattgagttctacaacttctcttataccgtctctagtaataatagctggtactcctgtacaaatatcatattcaccatactcaccatctaaaatggctgatacagcaatgacacggtgatcatcattaaagattgaactcgcaatatatgctagagaatttccaattccgtaataagtagttcctttacgtttataaatttcccaaccagcttttgcagtcttctcaacaatttcatctaaatctatttcaccaaatcgttctttttgttcttctaaaatttgcagaattggctttccaccaacagttacatgagaccaagcaaccatttgagaatcaccatgttctcctaatgaatacccatgaatactacgagggtctacatgtagcatttcagataaaattgttcttaagcgagaagaatctagtgatgtaccagtaccgattacgcgatttctaggtaatccagataatttccacacttcatatgtaataatatcaactgggttcgatgcaagtaagaaaataccatcaaatccactttccattacgccgccaacaacactttccataatcttcgcactcgctcctaaagtatctaagcgactttgccctggttttggtgctggccctgctgtaataataacaatgtccatatctttgcagtcttcatagcttcctgcatatacttttgttcttgtatttgtaaagttaatgcaatgtgataaatccattgcttccccaactgcacgttcatgatttatatcaattaataatagctcttcacaaatcccttgatttacaatggaatacgcacaacttgatccaactaatccagtaccgataattgcaatttttcttgtatgtcttttcatagcaatctctcctaattgatcatataatctatttcttttgctctttacactcctaattataaaggttctcacgatagaaatcatggatactttgtgaaatattgagcaaatcgtttgtcctttttgtgaattgttatattccattttcgtcatatttgttacagctggaaaaatatttattatgtatttattgacatataaaaaagaagacgagcgaataaattcgctcgtcttctttttcctgttattccgcacttaattgactttttaattgctgcacaatcatcggattcgcaggtgctgccggtttgtaataacttttttgctttgcgtactcatacatattacgttggcgcatttcatcttgattacgaatttgaattaacgtttggtgtaactgttcattatcagactgagcaatataatttgcataacttgttaaacttgcatttaatcctgctaaataatcatttaccatatctttttcattcatgttccgcttcctcctatcctaggaaagtcattaattgctgtttcgtatttcgtgcatcttgcgcatccttttgtaacatttgtttcaattgtggatctgtacacgtctgtgcatactgctccaacttgttaataattgttgcgtgtccaccaattaaatgacgtaagttttctacttcaagctctgttaaattttgcatggaatactcctacctttcttctttcattctcctttagtattctgttctttttaaatcgtattcatgaaaaagctttcttacatttcaaatcaatcacatctatttataaatacaaaaaaatgttataattacagaaaaatacaaatattcaaaagctaaccttataataacagtataatcctcaaacaaaccatggtaggaaggtgtgctcatgcaaaaatatgttaaagttatcttctttatcatttacgcaatcctctatgtaaaactgttgattgatatattaaatttaaagccgttattcacttctatagctttacatatgttatttctcatttgctttctatttatagcacttaacaattataaaaatcgtaacactacatttttcctattgtttattagtgcaactctattagtaagtattagcttcattaaaagtattcttatataaaggagcaataaacatgaaaacacatgacttccttacagaaatccagaagggctctgagcctagtccctatcaagaccccatcgtattcagtttcgtttgctttttcttagcgatatatacatttttcaaacctgcaaaataatatcatttcataagaaaaagcctaccattcttttcgaatcatatgcacaaaaaaaccttagaatcacttctaaggtttttgtttgctttgcttcttattcacgtaatcctttaataaacgtttccaacaatacatgtaaactcgtatctaaatctagcggcaaaccaaatcccccttgctgttcaatcgacgcaaatccatgacaaatacttctgaatccgcgtgtcgcatgaagtgcattctctccttctaagccatactgttgtaatacttgaagacaaagctttacaattccgtcacctgcttttcttacttcttcatctcgtaaaaaagttgcttcatatagtccaggatgttttcggacaaatgctacatacgcttctcctaatgcatgaattgcttcgtccgtatatttaccctcagtagcttcttctagtctgttatgcagctgtttgattccgtaaataccaagatttttccgtacatcttgtaacccttttacatgattatatagtgagggcgaacgtatccctaacctttgcgctaatgaagctaacgttacttcttgtattccatttgtatctgcaatttctgccgctgtttctacaattttttgtaatgtaagtccgattctcggtgacataaattacccctctttcttactttctatattccgcttagcttccttaatagcaagttttatgacagtgtctggattctttatcattttcccatgtcctgccgcaagtaaggaaggctcatattcgcttaacttctctgcactttgtaatgatatttctttgctccacgttgccatcgcaggaaacggaaaccaaaatttcatttgtcccgaaacagccatacctcctcttgtttggaatgcatccccaacaataagagctttattccgtacatcaagaaacgacatggatcctggtgtatgtcccggtgtcataattgcaagaagcgatccaactcggtcgccatcttctaataaaacatcaggtaccgtttttacttttttaggtacaccgccttttatcggtatattcggttcatccttttgtaacgtcgtatctccttctaacagctttgcgtcccgcttagaaatatagactggaacatgaggaagtacttcctttaatgcatctaatgcaccgatgtgatcatcatgcgcatgtgttaatacaattttagtaattggttttcctattttctcagccgcctgtaaaataccttttgcgctatatggcaaagccgcatcaattaaagttaaaccatcttcttcctctacaaagtaacaatttacaggaaacgctcttggcaaaaatgacaattgatataacgttttttcatgtatcatcctcatagtcccatctcccttttcacgaaaactaatgccattagttttattatactaatagcattagttttataccactaaaaaatttctttttttcaaaaaaaagaacagtagccgtataaacgactactgttctttaaagatattaaactgtataacgctcatcttctaaaattttcgcagcgatttcacgtttcttcggaattacgttaagtggtgtgtggcgagttaatttacgtaatgatgataacatcatgcgcagcatgtcgccattttcaactgcgataagtgtttctttcgcatctgcttcgatttcgttgaatgcttcttggcagaatacttcagtgtataacactttttgtttattcttttcaagaccagttgttttaattgctttttctgtacgaagaacagctgactccattgcgtataggttgcttacgatgtcagcgatattcacaagaatttcttgctctttatctaatgctttaccgtatttttgagccgctaatccagctaccattaagccgattttcttcgcattagttactaaatacttttgaagtgctaatggctcatcgcctacttcttctggcatcatcatcattaactcttcttgtaatttttgtgctttttgaagaagtggtaattcacctttcatcgctttacgtaagaacgtacctggtacaattaggcggttaatttcgttcgttccttcgaaaatacggttaatacgagaatcacggtacattctttcaatctcgtattctgccataaatccgtaaccaccgtgaatttgaacaccttcatctactgtatagtctaatacttcagaaccaaatactttgtttaaagagcactcgattgcatattcagcgatagaagctgctactgctttaccatcttttacttcttcttcagataatgtgctcatgcggctttcgaataaacctactgtacgatatacagagctttcagctgcatatgtttttgctgccatattcgcaagtttctcttgaattaatgggaagcgagcgattggttgtttgaactgttgacgttggtttgcatattgtgctgaaatttctactgcacgtttcgcagatccaactgtaccaacacctaatttataacgaccgatatttaaaatgttgaatgcgataatatgacctttaccgatttcgccaagtaagttttctttcggtactaacgcatcttctaaaattaacgtacgagttgaagaacatttaatacccattttcttttcttctgggcttgtagatacgccagcgtagtctttctctacgataaatgctgagaagtgctcgccatctatttttgcatatacaacgaatacgtcagcgaatgcagagtttgtaatccactgtttttcaccgtttaatacataatgtgtaccttctgcatttaaacgtgcagttgtttttgcgcctaatgcgtcagatcctgaacctggctctgttaatgcgtatgcagctaatttttcaccagttgcaagtaatggtaaatactttttcttttgctcttcgttaccgaataatacgattggtaaagatccgatacctacgtgagcaccgtgagtaattgcaaaaccaccagcgcgagagaatttctctgcgattaacgctgagcttactttatcaagaccaattccgccgtactcttctggtacgtcagcgcctaataaaccaagttctccagcttcttttaaaagacgaactgaacgatcaaactcatgttgctctaaatattcaagctctggaagaacttcatttacgataaagtcctctgtcgttttagcaatcattttatgctcagatgaaaaatcttctggcgtaaacacttgatcaatcgtaatctcatctactaaaaagctaccgcctttaaccgcatttcctactgttttttccatgaaaatttcctccttcatattttcatgagccgcttctctctttttgaaagaagctggctctcccttttgtttttataaacctttgttgcttccatttttttttataatccagttccagcggctagaatgttcggtggcttcgcttcttcctacgaggcaaagagcgcctctacgtctgaagctccatccccctcacattctgaacaagccgcttccactttttttcataatccagttccagtggctaaaacagtcggtcgtttcaccccttcctgtgaggcaaaaagcgcctcttcgtcaaggcttccaacgccctcctgttctaaacgagccacctgcactttttaaagtaattcaaatactcccgctgctcccattccgccgccgatacacattgttacgataccaaattgttcgttgcggcgtttcatttcgtgaataagagatagtgttagttttgctcctgtacagccaagtggatgtccaagtgcgattgcaccaccgtttacgtttactttttcttcatctaaaccaagttcacgaataacttgaatggattgagaagcaaatgcttcatttagttcgaataagccaatatcagataactctaagccagctagttttaacgcttttggaattgcagcgattgggccgattcccattacttctggtggtacgccagctactgcaaatgaacggaatttcgcaagtggcttcatgccatcgctcactgctttttcgcgatccattaataatacagatgctgcaccatcactcatttgtgaagagttaccagccgttacagaaccgcgaacgttaaatgctggacgtaattttcctaaaatgtctagtgtcgtctctgctcttacaccttcgtcttgtgcgaaagtgattgtttcttcttgaagtttattgtttgatccaaccgagcgtaacgtcacatctacaggtactgtttcatcagcaaagtttcctgcagctaatgctttcgcagcacgttgatgacttcttactgcaaatgcatcttgctcttcacgagaaattccatatttcacagcaacttgctctgctgtatgtcccatacccatataatattctggagccgcttctacaaggcgactattcggacgaacaacgtgtcccatcattggaactaaactcattgattctgctccgcctgataatacagcttcagagtgaccaagcataatacgctcagctccgtaagcgatactttgtaaacctgaagaacagtaacggttaatcgtaatagctggaacatcgtaagaaagtcctgctaatccgccgatattacgagccatatttaaaccttgctctgcttctggcatcgcacaaccgaaaattaaatcatcgattggtccttcataattcgcacgctttaacgtttcctttactactaacgcccctagatcgtcaggacgaactgtttttaatgaacccctctttgcttttccaattggtgttcttgctcccgcaacaatgacagcttctctcatgaacgatatctcccctcgttattagttacgtaatggctttccttttacaagcatgtgctgcattcttgcttgtgatttcatctcacttactaagctaataaatgcttcacgttctacatctaataaatattgctcatcaacctctgttccgtacggcacttttccgcccgcaatgacatatgcaagtttcttagcaatgtgaagatcgtactctgaaatgtaaccagataaatgcattgcttccgcaccaagtgcaagagttgcatatcctgtttccccaacaactggtatctttttacggatcggcgctttataaccagcttcatataaagcaagtgctttctgtttcgcatcgtatagtaagtgatcaccattcacactaataccatctttatcacctaagaagttatgagaaactgcttcttgtcctgaagttgaaactttcgccattgcgactgtttcgaacactttatttgcaactttttgcagatcaaactctacaccgtttgccattttgtttaagtgtttaatgtatagctctttattaccgcctccgccagggattaagccaacaccaacttctactaagcccatatacgtttcactagaagcttgaatgctcgctgctggtaagcaaacttctgtacctccgccaagcgtcataccatatggtgctgctacaactggcttagaagagtacttaattttcgtcattgcatcttggaagtttttcacaacccactcaatttcaaagtagttgtcgtcttgtgcttccattaagatcattgctaggttcgcaccaacgcagaagttcttcgattggttaccgataacaagacctttataattcttttctacttcatcaacagcgtagttaatcatttgcgtaatatccataccgattgcattgctcttcgaatggaactctaagcaaaggatgccgtcgcctaaatcaattaagctcgctccgctatttttctttaatacaccattttttgcttttaattgcttaagagaaattgcttttttattacgctcgattagcttatattcgccattatcgtaatagtagctatcgccgttatcatgtttatagaaagtagtgaaacctttctctaacatttctttcacccaagtaggaacaactacgccgttttcttccatcttttgaacagatttttcaacgccgattgcatcccacacttcaaatggcccttgctcccagccgaagccccacttcatcgcttggtcaattgcaacgatatcgtcagcaatttctttatgaagttttgcagagtataaaagagttggtgtaatgatgttccataataactctcctgcacggtctttcgcgtatacaagcgctttcaatttattcgctaatcctttttcttgtttacttaactctacggatgcagcttttaattttttacgcgcttcgtattccatcgtttcaggatttaattctaaaatttcttttccttgttttaagaagaagccttgccccgttttacttccaagccattttttctcaagcatgtcatgcatgaaagctggtactttaaatacatcacgctcttcttcttgcacattttcatatacgttatttgcaacgtgtacgaatgtatctaaaccgacaacatctaatgtgcggaacgttgcgctcttcggacgaccaataagtgggcctgttacagaatcaacttccccaatgctatagccgcgttttaccatctcttgaagagtaacaagtaaaccatacgtaccgatgcggtttccaataaagtttggtgtatcttttgcgataacaacgccttttccaagaacgtcttcgccaaatagtttcatgaagcttaatacttgtggatctgtttctttcgtcggtattacctctagaagttttaaatatcgtggtgggttaaaaaagtgtgtgcctaagaagtgtttctggaagtcgtctgaacgaccttctgccattttttcaactgaaatgcctgacgtattcgagcttacaattgagcccggtttacgaacagcgtctactttttcaaataatttctttttaatatctaagttttcaactactacttcaataatccaatctacatcagctagacgctcaagatcatcttctaagttacctgcttcaatcagtgctagatttcctttcactgtcagaggagctggtttttgctttaatagtttttgcacagccgtattactaaaacgatttctcacacttttatgttctaatgtaagtcccttcgcttcttcttcttttgtaagcgcaggtggtacaatatcaagcaataatgtcggaataccaatattagctaagtgtgccgcaattcccgaacccattacgcctgaacctagaacagcagcctttttaatttggaacatccaattctccccctattcttgaatgaatgctcattcaatttttcgacataagtcgcaatcaatgagtgagcctctactaataaatatatgatactgtttaaattttcgcaatatatttattgataaaattttctgaaataaatatttttctttcatttggccatgctatatatgtattttcttcactaaaatacactttccctttttataatctgacgaaactggaggaatatatatggcaaaacttaagaagaacccttcaaaggctggaattagtgcagctagtgtaactggaaatgcaggtccgcataaccacggcgtggaaaaaggacgtcaaggtaataaccaacaatataaaaagcataatatgggcgaaaaataacgctatatttttgggcagagaacgtggcataatgattaatggctgctttttctgcccaatttatttgtaacaaatgagggaattataatgaaacgaacaatagttatgattgtaatgattgctacactatttacagggatgattttcttctcttatgcacaaagacaacaagctgtaagagctgatcaacccaacattactgggcaatacggagttacaatcgatgcagacacaggtgaaattttgtatgggaaacgtgaagacgaacgctcttatccggctagtatagccaaaatgatgacaacccttcttttactagagaatgtaaaagaagatgaagaaattacagttacagaaaacgcaattaaaacagaaagtcaaagcaagaaaattaaacttcgtgctggagaaaaattaaagcgtgatgaggcattaaaacttatgcttatcattagtgcagatccaatagctgaatccatcgcagaacatattgcaggatcaaaaaatgaatttgtaaaaatgatgaatgctagagcgaaggaacttggtacaaagcatgcgactttcaaaaacgcaagtggtgctgatgcacttggaaataaagtatcgccatatgacattgctattattacgaaagaagcattaaagtatccagttgttttagaatatatgaattcaacgcgtacaactctacatacttcagaacgctctccaaacatcgcaaactacggacgagaagaactatatgacgatccatatgcgattggaagtaaaagcggtctatcagcacttggcaaatatacagtcgtaacagtggatgaaaaagacggtaaacgtgtcattaatgttgtattatcttctacccgcaagcaactgtatcctgatacgaagaaaatggcacattatgcatttcagcaattaaaataaccaaggagtattttctccttggttattttttaaccataccttttaatacgaacgcaacgtttgctggacgctctgctagacgacgcatgaaatatccataccagtcgtttccataaggtacgtaaacacgcattttgtagccttcttttactagctcaagttgacgctcattacgaataccatataacatttggaattcaaattgatcccttggaatgttgtgttcttcagcaagtttttttgtatattcaataatcgcttcgtcatgtgaagcaattgcagtataatttccatttaataagtgcattttaataatttttttataattgtcatctacatctttcttgtctgggaacgccacttcttcaggttctttataagcaccttttacaagacgtaaattcggattataagcatttaaatcttcaatatctttttctgtacgatataggtaagcttgaataacagtaccaatattatcgtattcagattttaattgtttaaagatatcaattgttttaccacagcgtgtatagtcttccatatcaatggtaacgaacacaccattttctttcgccgcttctaaaatacggcgcatattgttcattacgatttcatcagagatatctaatcccatagaagtcatctttaaagaaagctgcgaatcaagaccttctcttccaattgcacggatcgcttcaatcgattggttagccatttcatttgcttccgcttcattatcaacgaattcccctaaataatcgattgttacacaaagtccttgcttgttcaattgtttaatagctgctgtcgctaattcaattgtctcccctgcgacaaagcgacctgcaccaaagcgtaaaccgtactttttagccagttttgttagcgctttattttttgacaagaaaagaaacgaatttcgcattaattgttccatgtaattcacccctatgactgtaatttatctgttttttacccctcttcaaaattatatcattgtttaaaattattggatacaaataattatttagataatttataaaatactataaaaacatttaaaaccctatattttcgcttataaatataactgaaatatttttcgacatttagaaaaatggagtttaataggcataaaataggcatgtcgaaaatattcgacatgcctataaaaccctttatattccatgtaaattatataaggatattaatacagaaaacttacgattatatttccctcaagtttttttattgctcatttcgcttctcttcattcagccttttaatatctgtaattaactgcaccatctcttctttcgcatctggataagtttcattccaatgctttactaaagctggcatcgtcttagctatgtaagaatacagtgcccacttctgtacctgttcttttctctcttcattgctctctccaagtaacagctcagtgtatttctccagtaaaccatcaaactgctcgttaaacttttcactcattttatttaccccctatatgaaaaaagcagcgaaaatcgctgcttttctttataattttgatcgaacagagtttaattttttctccattgtgcttactttatcacgacgatcatcaatacgaatagttgttgcaacacgctgtgcacctttcgtatatggaacttcatgcatttgttgaattacttctagaatgacaggaagatctccttcaataattgtattcatcggtgttaattgatacttcacgcgatccgcatttttctctagcaccttttgtacttctgctacatattcactaacacttggattacctgttcctactggaataatcgatacatcaacaattgccatagtagtcttcctcctataatcgtttcttatatatccattgtctattttaccgaaatcctcatcattttactaatatgttactcttccactttaaactgctcgactaatctttctaaatctctcatatgttctgtcaaactttccatcgtgtgagctaccttttctaaatgattcacctgtgattccgttgcagcatgtacctcttcagaaacagctgcactttcttgactcgtaccagcaattgtatgcattaccgctgtaatttccccttgctcgtaacctatgttatgtacctcttctacaattttttcaactgaagtactaatcgtatttacaactgacataattgtgcggaactccatttccgcctctgtcgtcactttattttgtacatctgcaatgtctttcaatttacttacaacttctacaaccctttttacttctaattgtacatcaccaatcatcgttgtgatttctccggttgcctcttttgattgttccgctaatttccgaacctcttcagcaacaaccgcaaatcccttaccttgctcacctgcacgggcagcttcaatcgatgcatttaaagcaagtaaatttgtttgatccgaaatgccttttataagctcaacaacattttgaatcgatccaactctttgttctaacttatccgatgcttcttctgtatgaacaacaatcgaagatgattgtcccctcgtacggattaaattcctcattgtatttaatccttgcttagatgcctcttccgctttgccagctactccttttatttcaccaacggagctattcatttgttccactgactccgccatattctcgagctgagctgaaacttcatccacaccattcgcaagagtagaggctcctccactcacatcatccattgctcctgaaacttctctactagccgctactgtttcattcgttaagtaatgtaaactattcgttgattgttgcaccgttgatacgctgtttttaattttacttaccatttcattcatttgttcaaccatatcattaaagtgcttagtcaactctccaacttcatctttacttgtcactttcattcgcaacgttaaatcgccttctgctactttttgcacgtgattctttaatagttgcagtggtcttgctaatcttcttgagaacaagtaggaagctacgattccaactaataaactaatacatgccattataataactgtatttctcgtactatttaatagcccatcgattgtttctttcggataaaagattcctatcgtccatttcatcgtatcaaatgattgactgtaaacaactacatcttcaccttttattgtactgaccgcatattttgttacctctttatttaagctctttataagcggctctttagaaacatctttccctatcttttctggataaacaagagccatatttttatcatttataataaacatttctccgtcattattgtattgaatattgtgaagcaacttctgaatcgtcccaagcgatacatccatcgcaacaacgcctaatacagatccatcttgagctgtaattgctttagaaacacctacacttaactttcctgttgcaatttcataagaaggttgtccccagtggaccttttttacatcagcctctgaatctttataccatggtcttgtcgttggatcgtatccttctggcacttgcccaccttcagcaagattggcacttaatgtttttttatctttcgtaccaatatataaatctaaaataccaggatgattctttttatactctgcaaactctttcgttaaaaacgcttcctcttctggagtaaccccaccttgaagtatattacgaatcatctcactgttcgcgtaataccccatatcttcatccgttctttgaacaaatgtcgtaagttgctctgtcacaagatccatcgcattttgagaatactcgtctaaggaacgcacttccttttctttctgtaattgatacacagctgtacccaatattacgaacatcatagaaataagtactgaaaacactaccgcaatttttaaacgtaaacttcttaacatcttccccccagcatccccttcgcattaaattaaaatcttattaatcattatattaagtataatagataaaattaaaaaattgaaattaattctcaccttaatacaattagaaaacggactaccacttgtgcaaaaacaaatagttcattatccttaaaatataatctcattcgttcggagggaactatgttacaaaaattcggtttctcacaatatgaaagccaagcttatgaagttgtcgtatcaagcaatgaaccattagatgctacaacgattgtgaagcattcaggtgttccaaaagcaaaaatatatgaagtgctagcacgcctaatcgataaaggaatggtaatggattctgtttcagaaaagaaaaaactgtatacagcattaccactaaagctagcaattgaaaaattaacgacagaattccaatcaaatattaaagaactggaaacaaatatatcaaaaaaatcatttacagatgaccgtgtgtggagcttaaaaatgcaatcttctattcgagttcaaagtaaggaactcattgaaagtgcaaaagaatcaatccgtatttcagcttggaatgatactcttttagaatatcttcctttactagaacaaaaagcaaaacaaggtgttcaaattgaatcccttattgttggagaagtagaaacagacttagaaaacatgcattttctaatcccagctgaagaacctaatgcattagagcgctacttgctactcatcgttgacgatcgtgaaattttatttgctggcgtagaacaagagtcatggcaagcaatgaaaacaatgtcacaaccattcgtaaagttctttacagaatttttctatcatgacgttgcacttgcaaagattacccagaaacaccatgacctctttatggaagatgaggaaattaagagtttgttaatgaaattaagatactaattaaataataaaaaggagtctagtttttcacttagactccttttcgttttgttcctttatctccatcaacagctcaatgattttctcattttgctctacttgtttctctgaatttttatagatgaaacgaacccatctaagtgcaagaataataagaaacaaagggagcattgaaattagaagaccaataattgaaaaattcgtatacatatacatcacctcgctacatacaaattctccacctttctactaaaacctgcgattttttacaaataaaaaaagaacctatcaaacgatagattcttctttcacgaactgagtagagcgtcctctcgtaatcgagaaaatcgcgcaaagcagtgctaatacaataaagccaccgcctacccaagcattatatataacagatgatttttcgataacaactccgcctactgttgaaccaagtgcaattcctaagtgaagggcagagttatttaaactttgctgaataccagctgattctggtgcaatttcaattaaatagttttgttgcgctggtgaaatcgcccagctcagcatactccaaagtcccatcataatgatgaagagtgggaatgagaatgtcattaatggcagtatgaagattgcacacgcaaatacgataatgatggaaataatacttttcttcgatccccatttatcagcaagccagccaccgaatccgccaccaattactgctgcgattccgaaaataaagtaaaacacactaatccagtttgcttcaacatacatgacatcttttaaaaacggtgttaaatatgcatacaatgttaaatgccctgttaaaaacaaaaatgatgttaactgtgcacttacaatttttttatcttttaaagtagcaagttgttcttttattgataataccgatgtcggtggtactttcgttaagaataatgaaatacaagcaattgccataactgttaataccgcaattaatacaaatggtgcacgccatccgtatgcatttccgagcacaagaccgagcggtactccaagtacgagtgatccgctaattcccatgaaaatgattccaattgcacgcgcacgaaaatgcggttctacaacactagaagcaagtgttaccgatagtgcaataattaatgaaccactcgccgcacaaataacccttgagaacattagcattccgtaattcacactaaatgccgaaataatatttccgattaagaaaatcgataatgctccaacatacaatgtttttctttcaaacttccctgtcaaagctaataaaactggacctgacaaagcaaatactaccgaaaatattgttataagctgaccagctgcgctaatagatactcctaaatcattggcaactaaatcgagcgttcctcctataattagctcaaccgttccgactacaaaagccgcgatagctaaaatataaacacgaaaattcaagtctttccccacgctttctattttggttactacgactatagtaaccaaaatagaaaatggaagcaagtacaatttttttacagtaaaaaaggtaggcgtataatacgcctaccttttcatcattctgtttctttcttcttatttaaataccaatacaccggaagtcccgtaaatacaattccaatcgataagaaacaacttactggatcgttaataatcgcactaccaattacaaaaaacgaacctaaaatcgctacgattggtacgattgggaataacggtacactatatgcacgctctttattcttattacgttttcttaaaatgaagacaccaataaacgtcattacatagaaaatataaataatgaatacggaaatctcagatagcttatttggatcactaataatcattaaaataattcctaaaatgatttcaacagtaatcgcatttgctggtgttttaaatctcggactttcctttgcaataaacttagaaaatggaagttgtccacgctctgccatagacattgggatacgtgggaacgttaaaatctttccatttaaacagccgaaaatagaaacgataataccgatactaataatttttccgccatattctccaagtaacatgcctgcagctgtcgctgttgcattttctccaaggtctacaattttcgctgctggtaatacatttaataatgccaagttaattaatacgtaagcagccgttacgattaaaatccctactgtcattgctttcggtaataactttgttggattcttcatttctccaccaatcgaagcaagtaaaatccagccgtcataagcaaataacgttgctaaaattgccataccgatactttgattttccgatatcggcacaactacgttaaaaatatcgctattccctttccagaaacctagcacaacaattaacacaatcggaatcatcttcccaattgtcgtgattgtttgaacgatacctccgtattttgttcccatactatttacaacgccaaggaacacaaccgttccaattgcgattggtaaattccacactttatctaaatagaaaaaattaatcactaaagaactaaagtataaacctaatgttccgataatagcaggtccataaacaattgtttgcatccaacctgataaatatccccaaaaacttccgtaaatctcctctaaatacgtatacaacccaccatttttcgggatttgcgctccaatttcagctactgttaaaccacttgctagcgtcaacagaccaccaattacccaagcaagaatggccatattagaactccccgagtaatctaatacgctccctggtttcataaacacaccagatccaataatcgttcctactacgatagaaagtgctactgttaaaccaattttgttcttctcatcatgatgcatgctgcgtatcctccttccaatcctagtgtgatgcaaaaatgaaataaaaaaacactcctccctaaaaaagggacgagtgttgtattcgtggttccacccttgtttcaattcgtaaagtaacacacttcaccaatttctcaagtctaaataacggtttttgccggcaagcaattactagatgctcgttcactgctgcagttcagaggtggtaatctatttttccgtattaggaagctcacagccaaaggcttccctctctgagaatcgtaaaaaattgatcgtgtcctcatcatcacttcttgatgtcgaattttgtagttattgttcattatattgaattgttagaaaaaatcaatatattttttatataacataggaaatatttatcttcttatattataacagaagctgtaatatttctctaattccctcgtatctttggagcagtgtagctgtaaaaattatatcagcgatttttcaaatatatcgatttaccaacaaaaaacgccaacaataaaaggaggtctttcaaaagaaagcccccacacgaaagatacgacttcattcaattatttctcatcttttttcataaaaaacttatggtgcggtaaatcaacattcaatgcctctaattgtttcttttcattgtctaaaatcgcttttgcttttgtttttgttgcttcatctaatcctgcaaagatgtcttcatgcttctctttctctggaagtttcacacctaattttgttaattcttcttttgcttgctcatgcgttaattttccagatttcttttgctctaaaattgactttgcttttgcttttgcctgttcatctaagttagcaaacatgtctccatgtttacctttctccggcattttcacgcctagctttgttaattcctcttttgcttgctcatgcgttaattttccagatttcttttgctctaaaatcgacttcgctttctctttcgcctgctcatctaagttagcaaacatgtctccacgcttacctttctccggcatttttacgcctaactttgttaattcctcttttgcttgttcacgtgttagttttccggatttctcttgctctaaaattgacttcgctttttctttcgcctgttcatctaatcctgcaaacatgtctttacgcttctctttctccggaagctttacacctagttcctgtaactgtttctttgtatcgtccataatcgtttttactttttgttttgtagcgtcatctaaatcttttttcactgtttttgtcgcttgctcagctgttggagtatttgttgccgcgaatgccggaacaccgactcctccaatgattccgaatgataaagcacctgcaatcgctaaataaccaactgttttcttcttcataggaaatttcctccttcatatttctaaagcatgtacactttcgtatacaacgccaatagtaatattggtttcttaaaatttccttaacgattcaaataaaaaacaccgctcgtaatgagcggtgtttctctatgctttttgtaattgtaactcttcacgttccattatttttcttaatacaattgtttgtgtcattgtaaataagttacctgttatccagtacaacacaagtcctgatggcgccgcaaaccccataaatagaatcattgctggcatcataatttgctgcatctttagcatctgtacttgttctccaggtgtaatattcgattggaaaactttcatctgaataaatgtcgttaacgctgcaataatcggtaatatatgatatggatctgcatgtcctaggttcacccataaaaacgaagatgtgcgaatctcttccgttctgctaatcgcataatacaaagcagagaaaatcggcatttgtataaaaattggccagcaaccagcaagtggattccaaccgcctgatttcattagttctgacatttctttttgatactgcttttgtttttcaaggtctttgcttacatcaccgtattttttctttagcttctgcaattcaggttgcattttcttcattttcgcttggctgcgatattgcgaaacagctaatggaatcatggctgaacgaataacgagcgtcataataatgatagcaaccccgaagctagctcccggtatatgatgagcaacaaattgaatcatatacgagattggatatacgaaataatggttccatattcccgtactatgtgaatcaattgtgcctgcattactgcagccggataaaacaaaaacaagtactactgataaactaatgagcgcagctcggtatgattttaacatgttcattcctccaatgtttcgtaattatttagcgaaacattggtgtatacggaccaacctcatcattctcttcacttgattcttgtctgcgtacggaacgaatcattccatatttataaaaaattgaaaatagcggtacatttcccgcactatcttcacatgtatcaactaacgcaaaagctctttgtctaccgcttgatgcttgttgacgcacaaagcgagaaacattagcaaggaagaaaacttctaataagcaaagtgctgtcgttacaaacgatatatatagaattgcatcctgcaataaaaattccatcgcttcacatccttaataaggtcattttagcacatcgggcaaatattctctatttccttttattttcaaaaaaagtattttgcatattttctcaagaaaacaataattaagaaacgttgtattcgctttctttagcatattcacacacatcaatgaataggcttgatttattagaaatttataaaatttttgcattataataaaactattgccagtttttgaaaaaacctttattctcttcttgtaatcaaaaatgaatatggagatgaaacatactatgggtcaactaggagacgccgattacgttcccgacaccgcctttttatccttcccagcagctaaaacatttcacttagaatttatgatacagttggttgttatttttatagcttctattttgtatgcaatttctatgaatatgttttttatcccgcataatatgattagcggtggattcgctggtgtagggatgattatcggttatttaatgcactacaatatcggtgcacttatctttttactaaacattcctcttcttattttaagtcacttttacttaggaaagaagacaacctttttaacagcgtactttgtagctgtgtcatcgttagcgatgaacattatcccggtacaccaagtttcagacgatattttactttcttctgtattcggtggtgttatctgcggagcagcttcaggaattatattccgatttgcttcttcaacaggtggttttgatgttgtcggattgattgtagcgaaatatcgagatgtttcaattggagcaatcatatttgtattcaacttaatcttacttgtagcagcaggttttattttcggatgggatattacactttatacgttaattagtcgatttgtagtcagcaaagttatcgacgctgtgcatacgaaacatattaaattaacgataatgactattacagaaaaaggcgaggaaataaaaagcgcactactacatcacggcatacgcggggtgacaatggtagacgctgtcggcggctatacaaaccataagaaaaaaatgatttacactgtcgtgactcgctatgagttaggcgaaatgaaacgtattatccgtcaagtggataacaaagcatttatgaacattactgaaacagttgaaattgtcggccgtttcaaacgcatataaaacaggttaataaattaaagggcataacatattagtcatatataatatgttatgccctttgttattcaactaacgtaccttttagcataataaaatcactaagtttattactacaaatcggaggatagcattccatatacaatactatctgtccattcctctttattccaaaaatcttgtatgaaatgggcttcctttctcatgcctattcgttcacacaatttttgtgaagctgtattacgtgcatcaagattagcctgtatacgatgtacattacattcattaaataatttcaataccaaactacttactgcttctgttgccaaacctctcccagctacttcctttgcaaaactataaccaatctcaacagtgtctttcatatttgtgtaccatacggataaatcaccaactactttagttttgtatataactgccaaacttaatattgtttctttagtaagtacattatttgctagcttcttattaaatcttttctgcatgtcttcatgagtccacttattatgtaataggaacttacatgtatcatcactattataaatagcaaatacatcctgtaaatcagtactcttaaaaggtctaattattaatctttctgttgtgaactccaagttagctctcctcccttacattcatgctataaaacattttttatagtatttaagcctcattcttagatctcaccttgattacatatttcatcataataaattaaaatccttcttccactaaactgcaccgttaatggtatttccttacgctttttattttttacacttattacaaaatcagataattctattattatgtccctaaatgtgttataatgaaagcagactcacaaaaaaaagagtatatagacttggaagtttctcttattttacaagcaaaaagaaacgagcagtcgggtatatttcagacaccatacacgtaacggtttaaacaaccgatcatcttagttactcttcaatgatctttttataaaaagatacgtacaattaaaactcacttcaatatactatacctacctttttgacttccaaatcatcttattacatagggagatgaacatatgaatcaatatatacgatatacaatagctgtcctgtttgctattatcggcggaacaatctgcttctggacaaacactcagcttggagagaatatcatctttaatggaatcgaaacgcttgtaagcgcttcaattttaggcggatacatttacttcctcttcaatccagaagaaaatgctcaaaaaacaatgttattaacaatgatcggaatcgttggtggatgtatttcctactcaatgacaaactatacattaccacttcaattaagctcagctttcttccacggtctatggacttggttcattgcattctgcctagcagacgtattcaacctattacaagacactgaagaagatagcggtcgtcaaattgaaagtaactcttaagctggaagatactcttccagcttttttatgttggtttgcataccccgcatcacgataaaaagaagttgccctcacggcaacttctttctcacataccccatccagtaccaaccggattatatcagcgattctccatatatatcggcgatttctccacttatatcagcgattttttcattatatcgaccgttcgacacaggctatcgacttaccggcaattttcggcaacctatttatgctctataccctgccactacaataaaaagaagctacccaacggcaacttcttttccacataccccacttcgtattcactaaaatatatcaacgatttttcaaatatatcgatcatttctccacttatatcaacgattttttcattatatcaacggttcaacacaagatatcgatttaacgacaaccttcgacactcgaaacgcacaacataccctatcccccaagcaacttactgccgaactctacgattaaaaagataattaataggatcgcgagtatctttaatgctacatatgccactttaaaaacaacataaatgagcaagactatcaaaataattgataaaatttccatatttacttcctccaagctttgctcttcttatctcattttactcgccccggactatttatggaacggcataagatgacatagaaaaaagaggatacctcacccatcgtaagataccctcaccttcaactgctcaaaccattctctttctaattgtaaatatcccatctcactcttctcggcgctctttaattctttatcagctttcttcatataagtatgggaagcttctagatcattctctaaatatttgataattccttgtgtacgataatatccgtttaagtccatttttgtaatagcctttgcatgttcctttgcttcttgcaaagaaagactatccatctgataaagggctttatataaaagataccaactatgaaaactgctaacgaaaaacttattttctttcgttacaggtagttgaacaattctttctatatacggtatcgctctttccattccctcttgatctgcacgagcaaaaaagacaagcataagtctactcattatctctcttatccctttattgtcttttattttctcctcactcaattctactaatctttcatcccaatctttcggtcttttataactaaataactcactcgatatttgaatctcatataaatgatttctagctctttcatcatctttaattaaaataagaaattgcatcccatcactcataagcgttccttttatcggcacaattgtaaccgcaaagattgcaaaatggaaaaaggaaaaatataaaagatattgataataactcaccatgtatatgtaaccggaagtaataccaaacagtaaactcgtaattggtccacctaaagtgagccacgcccattttttcgaaagattcggtgtctctatagaaggtggtactagtgttgcaacgcctccaaagtaagcccataatttatttgctcgaatgcgtaattttcccttttctttttgaatagtaatgggtcctactgtcataaatttaaatgttaaaccacctattacaccaaatactacatgtcctagctcatgaatggctaacactaataatgaaattccaactattgcccataggttcaaaattacttctaatttcccagttcggattactccgtataaaatggacagcattaacgccactgtcattgaaccagctggccttcttaaaatatccacctttttctccccttaataaatcattttcctttgcatttcgtacatgaacttcccaagatgcaatatccaaataaatgagattaagccaattaatacaaaatcgatattactagcagctgtatatataacggcagcccaccatacatatgccaatattgtattcttaaattcatatgctttatatccagcctcatgcacaatgtgctttaatccttcatctgcgtttttcgtccacattttcatagattccatatacgttacaccttgttcaggatatagcttattataacgattttttgttatgagtccgataattactacagtagttaaacaaacaatagaagctactaaattccacaccgcaaatgaaacatttgtatcctgcaacagtgcacgtctacatgtaataactgcatatacaaaccatgcctgcgtcactatatcacctacacgtaaatatatacttataatgcctaattttctgccttgtacgctctcttcttcatcgcgtgcctctgctaacatacgtgtattcttccaagtatagtacatcattaaaattccaaaaatagtacatatacctataaatgtattggatgataattttctcggttcatccgagagtaaatttaaagctatataagacgttaaaaatcctcctatcatacttaatgctattttccccacagaatcaaattgtttttttctcttactcttcatcgtcctcttccccctctactaacgtaaatatttcctccaccggtacattgaaaatttgtgcgatttttaacgacaatacgatagatggtgcataatccccacgctcaattaaactaatcgtttgccgtgatgatccaatcgctttccctaaatccccttgtgataaacgatgctttgctcgcaattccctcactcgattttgaagcttcatgtcttccctctttttcatttatttaattacaattgtaaataatatccttatatttgtcaattataattgtcattacgactataataattgacaaaatacttatttcttatcctgtatcaaattcctataaagaatgtaaaatgtgcattaaacatagtcttaaaaataaaataaaaaaggcagtgcttttgcactgccttcctaaattctgacatagaatggatttcatattaacttgcgttttgtagtaatactcgttttaactgcttacggaaacgaatacccaacgtaaccgctacaatcacaataactccaaaaatgattttaccgatatgatcttctagcactccaaagatatcatgtaagtttccacctaaccagtaaccaccgattaagaagaatgatacccaaaatagagcgcctgaataaattgtaatggcaaaacgacggaatggtaaattaataattcctgcaaagtatcctgtgaaatgacgtacaccaggaataaagaaaccaataaaaattaggaagtacccatacttatcaaaccacattctcgttaagtcaatttttctttgtgttaaaaatacgtatttcccatacttttgaatgaaaggcatacctaatttatttcctaaaaagtattgaatcgtcattcctacacttgtcccaataaaggatagaataattaaaatcggtaaacttaaatcacccttatgtgctaaaaatcccgcatatgctaatgttggctctcccggaaacggaagtgcaatatattctaacagcaagccgacaagtacaacataatacccgtattgctgaaataattcatgaatccattccatgtcatctctcctttcaatcacgtacaacttcttactattattgtataaaaaaattgtcgaaataactatcacaatagcttacatttttattacatttttgtaagggtcacactaatgattttcgttctttattaaatagtaaaaattattttccaagtcgaaatagcgaaaagacgcattaataacatgcagattttatccattttttagcactaaaaaagctttcttattttgttctcaataaaaaaccatcacaaactcatgctaacttcatattagcttcatatacgtattgtaagattatatcggaatttgttgaaaaatttaaccaatatatgactaagcattaatttgaataaatataagtcgtttttcgaaattgaaaaaagggtgaatacgaaatggaagcatataaaatgcacgattttattaatacaaatgttgaatctcatcaaaatgaaaccgtttttaatttacaaatatgtgaaacaagtgaatttgacgtaagtttaacaaaatctacaacactatcttttatcgtttcaaaaaagaatattaaaattgtcacgaaaaaatggattaattcaaatcaagaaagcatgattggcaaaagctacatcattccaacaaaagcttttcactatttcttaccaatcatttctgaaaatgaagatgagctaaatattcaagttcaaagttttggactacgtggtgagcttttattaaatgaaagattacttattgataacaacaaacacaacagcaaaatcactacattctttgaaacattagatgaaaatgtaaataaagcattacgaggattacaacttcattgtatgtaagactattacgatagtaaaaggagaataacaatgaaaaaattattattaagcgcactattatcattaggatttttaactcttccattcgctagtgcagaggcagctacaacgaaagatcaattaatcgtagacactcagttaaataaaatggattattatcaggatggaaaatttataaaaagttttactgtcgctactggaaaagctgcaacacctacacctaaaggcacttttcaaatcgtaaataaaattaaaaaccgcccttattatacaggaaaaattaaaggcggcgatccacgtaatccacttggtgaccgttggctcggattaaatatggcaggaacttacggaacaacttatgcgattcacggaactaacaataatcaagcaatcggcaaatggacaacacttggttgtattcgtatgtataacaatgatatacactggttatttgagcgcgttcagcagcaagctactgtcactgtaaaatagcctaaaaacaagatttatgtgtagccaagaattttatgtcttggcttattttatttattcatttacagtagcaaaacaactgtatttacatatataataggaatagatttgattagctaatatctaaacattgataaacgtagatattaaaattatacagttataatattttataaattttataatacatactataatagaactactgtaattctgaattattcagtaacactaaactattccccttgctaccttcatgattattttatagcgggggcttattatatgtataaacaatctgagtcactcgaaaaatgatgaattcgaatattgcagtaaaaagcgttatttaggaggtgttactatgacgcatatactggtgattgaagacaacccagatatacaagaactgattcgtgaatttctaatggcacaaaactttaccgttgatgtagttggtgccggaacagaaggtattcttcttttccaaaaaaattcatacgatcttgtcctcctcgatgtaatgttaccagatatagatggctatagtatttgtaaaattatgcgaggacaatctgatgtaccaatcattatgttaacaggcttacataatgaagaaagtgaaattaaaggatttgagttaggtattgatgactatattacgaaaccgttccattacactgtatttattaagcgtgtagaggctgtattaagaagggcagcaacgaaggaagcagaagctgcaactatactacaattccatgaattgatgttaaactctacagcatatgcagcttatgttcatggtaatcaaattgaattgacaacaaaagaatttgaaattatttatactttactgcaaaatcgaggaaaagtattatcaagaagtgatttgttgaataaggtatggggctatgaacattatggtgatgtaagagttatagatacacatattaaaaacttaagaaaaaaattaggaattccttatattaaaacggtgaaaggcattggctacaaaatcgaatcgtagcaaagacaacatcaccaaaaatattttcatcaaaaccttattattttgtattcttttatcactttgtctttatcaaattatttactttctagcttcaaactacgataaagaacgttttgcgaaagaaaatggaacgccgactacagaacaggccgattcagataagcaaaacgacggaagtaaaacgaagcaaaataaagctgtgtcaaaggggagtatttctaatttccaatcttctattatagattataaatctctttctacagctatcaatcaccttttgcagcctagccaaactgcaaaggcaaaagaacatacacaaaatctttcggggaaaaatagcacttctaatccgcctacagaagcagaaaagaaagccgctaataatgatgccttacatacacaaaatgcagcaagtaaaacaaatgatacaaatgataatccaaagttagcagatgcgttgcagcaattagctccacatattggcgcgacaatgcttgcattatcactactcggatcattaatttatacaaaactaattgccaaaccttttcaatatatgagtgatgctttaaaagatattatgaatcttgatttctccgataaaaagctacttaacaaaaatgcagatcaaacagattttaatttgcaagtagccgcttcgcaagtaccaaatattgtaaagaatttacatgcaagcaatcaagatttaagaaacgagctcaagaaggaacaacaattagaacaatctcgtaaagaatttatgtctatggtgtcccatgaattaaaaacaccaatcgcagccgtcatgggacaactagatggcatgattcacggaattggagcttataaagatagagataagtatttgaaacgttcctacgagatgatgcaagacattaacatattaacggaaaaaatgtcggaattatccaaaatacaaaaccctcaatttaaaccgaatttagaagtcatttctttatctaatattattgaggatgttatgaagaaagtagattactttgtatctgtaaaacaattaaatgtacaatctaatattaaacacgacgtacaaattttagctgatcctaaatttattcaaactgctatttttaacattatttcaaatgcaattcattatacaattgaccatcagcacgtatatataaagctttatgaaaaaccaaatggttacgcattagaagtattaaatacaggttcacaaattgatgaagataaacttgctcatttatttgagcctttctatcgcgcaaatcctgataaacacgggttagtacaaggtagtggtcttggattatatatcgtgaaacaaatattagataaacatcagtttccttacgggatacaaaacacagctcaaggtgtaaaatgctccattgtattcccaaaagcaatgtaacattcactataattacataccccaaactcatacttcatgtgtgagtggcggaattttgtagagtgtcttactctgtttcgttcgcccgttatccttatttggatagcgggcgttttttattacttaaaaggaggattttttatggaaaagtttaaatattcattgctcgttttattcggtgcttgcagctacggcatactttcaactattttcaaactcggattcataaatggattttcagcacatcaactcctagggggacaatatgtcttcggatggattggactatttctactcgttcttttcttttcacatcataaagtaacaaaaaaacaatttttttcattactaaccgtcggaacaacaatgagtatgactgggattttttacgctatttctgtagaagaactacccgcatctatcgctgtcgtcctactctttcagttcacttggattggtgtcattatcgaagccattgcaaatcgaacatttccaagccacgataagatcatatctatccttattttatttgctggtacattgtttgcaggtggtgtatttgaaggcctcggacaaagtttttctacgaaagggattatctttgggctattagctgctgtctctttttcattctatgtttttgcaagcgggcgcgtcgctacggatgttccgccttatacgaaaagctttcttatgacaacaagtgctactcttatcgtatgcctattctttccgccaacctttttaacagacggtgctttgcaagctggcctatggaaatatactttcttcctcggcttgttcggtgttgtcgtacctgtcatttgtttttcaatcggtgtaccaaaggttggaacagggcttagtacgatattaggtgcagctgaattaccaactgctattattgcttcaattacacttgtacatgaagtcgtaacgttcatgcagtggattggaattatttttatattggttgggatcttcactcctcagctgcttacggctaggaaagaaaggaaacacaatcgcgtgcacagcgcttgaaaaaatacagaatttatataaaagatataactgcaattaaaataagtaaatttatctggaggtataaatgactattttaagcatcgtattttttgctattatgtgtatcttcttcctaataagatatatgaaagaaaagaaattttacgatttacttctcgttcccgtttgtatatatgcaggagcagtgaaaactcctttcgtagagtacttaaactttaatactacatttaaaataacgtatgatattgcagctattattcttgtaatccttgctgtacttttctttttgaaagataagaaagagaatcatactgcataacaaaagacctttcatttacttgaaaggtctttttctctatctcattttaccgctccatacagcttctctatctcatgctcaatttgttttacatcgattcgctcaaataatggctgtacgctatcaattctacttggcaacgtattttgcggttcccaatttcggttcacaatcgacaatgtgtttcgaactctttcacttgaaaatggtaaaaatggttcaaggagatgggcaaaattagcgataagatacacacagttataaatcgtttcttcacatgaaactggatcatcttctctttgtttccaaggctgcttttcatcaaaatatttatttgcaaaacgtactgtatcaaatattgtttctagcgccaccttaaatttagtttgctcaatcgcctctcctacacgcttatataatccttctactttatctttcagctctacctcaatacttcccttcgtcacgataccaccataatatttttcgataaactttaatgtccggttcacaaagttcccgtatgcacctaataattcactattatgactgtaaataaattcccgccatgaaaaatcagtatcgcgattttctggtgcgttgacggttaaaaagtaacgaatagaatctggatcatagcgttctaatatgtcaggcacccatactgcccagtttttacttgtagataattttcttttttcaactgttaaatattcattcgaaacgatatgacgcgggattgcttcctcccctattccaagtaataccgctggccaaatgacggaatgaaacggaatattatcctttccgtgcacataatatgttttcgcttcgctatcccaaaactcttgatcatctttccctgtttcttcagcccaatgtttactcgctgaataatagcctgtcactgcttcaatccatacgtaaattttcttatcttcatacccttctactggaattggtaccccaattggtaaatcacgtgatacggccctatctattaatccttcctttacatatctctctgttagttgaatcgcattgtcgcgccatgtccctgtttgtttggcaatttctacagctcttttaatttgctgctgaaatgtatgcaatgcaaaatagaaatgctctgtttcctctacagatggcgtactaccacataacttacatttcttttctaacaaatcgagaggatctaaaatagcagaacaagcatcgcattgatctcctcttgctgcttcatggcaatgtggacatattccttctacataacgatccggtaaaaactgtgtacacgtttcacaatacgcttgttccactgtttttttataaatatgtccttcttctaataaacgtaaaaaaacattttgaaccgtttcatgatggtgctcactatctgtacgtgtataacaatcataagtaaaaccaaggctacgaaaacatcgctggaactcttcatgatacttatcagcaatttctttcgctgtcacaccttcttgttttgctctaattgcaatcggtgttccattacaatcactccctgaaacatacagcacattctcaccttttgccctgtaataacgcgctaaaatatctccaggtaacaaactcgcaatatggccaaggtgtaacgaaccatttgcatacggccaagcgcctccaataaaaatactcatcttacattcctccttttaaatataaaaagccccgcccttatcttaaaaaagataagggcggggctgtataaacagtcgcggtaccaccttatttcgctaattactcacataattagccttaacaagtacggagcaatatgctcttatactgtggttttgataacgagtaccaactctcgtcgccgcctactattatcatttgataagttcaggacgaagctcaaaggccattgttcaaatgaatattcttgcttcttctcagctaccgaagctctctggaaagaatgtgttcatcctacttttccttttcaacgcttttacgtataaaaagtattgtacgacttaatcacggaaaaatcaaacttttatccagaaagaaaaggaaatcccatccccctgccgaataactatacgttcacaaaaggagtgataacattgaatcaaaaacaactaagcactataaatgaaaaaagctggaatgcagctgcttatgaagcttggacgaatcgccacggggcaccagctgattatgcgaaaaaaatcatgaaagatcccacgcgcgaagtagcacattatttaccttacataaaatccccaaaaggaaaatgtattattaatttactcggctcaaaaggaaataaagctgtcgcactcgcccttttaggctctgacgtaacagttgttgatatttcagcaagtaatgcaaaatatgcaaatgaacttgctgatgccgcaggcgtctctattcattacatcgtttctgatgtactagatgtaaatctctccaaatcatttgatatcgtattactggaacttggtgtacttcattactttctagatttaaaaccacttttcacaacaatctctcaactactaaagcccggtggaatacttatccttcgcgattaccatccaatatacacaaagctattaggagtagaccatccatcatttcgagcaagtggaaattatttcgatgaagaattaattgaagatgatgttgcttatagcatccttcttacagaagcacagaaagaatcgctacctaaaacaaccatccgtcgctggacgttaggagaaatcattacaacactcgcggaagaacattttaaaattgaaaaactagttgaagaacacggacctcatcaaagatggctcttcccttctactgcaccggaaagaatcgaagaacgtatccctggtctatatacaataattgcgacagcatgcaaaaaaggatcccttcacggataggatcctttttgcatgctcacgcatataagttgaggttggagattaccataattctgtagaataggacacaagatatttcaacatttcgtctctgacttacgtcgtcaaaaaggggtatgaccaacataacgaagagtaatgttttagttgatactgataatcgttatcaactaattagaagtatacatgatgtcatttcaaatttcaatagcatttctaatatttatttatgaattttatgatatgcaaatgtatacattttaagaactttttctaatatcaatctgactccttccattatctgctataattttcattgaacagattaataacttcataataatgtttttattaatttcgttttaaatatctataaatcataataaacagtttaaacgagggtaggggtaacgatgaaatatgttagtattcgaaaaaaactactgttcacactcttaagcatttcttctttatttagcattgctcttattgttattctttcattcgccatgaatcaagcaagtgaaatcgaaacgttaaaaaatgatgtatcaaaaagagcgacgattttaaaagaacgtggcgattggttccaagcacaagttgctggtttacaagaatatttactatcacatgatcaaaaaggattagataagttcaaccgagaagggaaaaaattagctgatactagagagaaagtaacaagtgacaagaagctcccagaaggaatgaaagaagctattttaatggggggaaaatggcgtagcgtcatagataatgaggtactacctcttgctcgtgaaggaaaatgggacgaagcatccaaaattgctttagcacaaacagattatgtaaatgatcttttaggtcgttttaataaatatacaaatgaagagaatgagaaacgtgacgcattaattgctgacgtcgagtcttcttcatcacttattcaatatattattttcttctcactcattacatgtacattaacgtctattttattagcatggtggttctctggtaaactcgttaaaccaattcgacaaattgatgagaagttaaaagaattagcttctcaagatggagatttaacggctagattacacgtaacaagtaaagatgaaataggtgacattgcaaattcctttaatcaaatgctcactaacttacagcttataataaaacaagttcaacaaacatcaacaagtgtaaaagaagcttccgaaaatgtatttatcgaaacgactgcttctatggaaaataccgcaaggacccaagaaactatgaatgctcttgaacacaatattcgttcacaagtttctagcattgaagaaagttcaactgcaatggatgacatggcaacgagtgttcagcgtatcgctgagtccgcctcttctgttactagtttagctgttacaacttcagaaaaagcagatgatgggaataaagtcattgagaaatctattacacaaatgcacacaattaacgaagctgttaacgctacatcacaagtagttgagcgactcattacacatacaaatcatatcgatactgcacttcaatctatttcgaatatcgccgagcaaacaaatttactcgctttaaatgcttctattgaagcagctcgtgctggtgaacatggcaaaggattcgctgttgttgctgatgaagttcgaaaacttgctgaacaatctcaactagccgcaactgacattaaccatttactgcatcaaattcaagccgatactaaaatagcaaatgacatgatgacacaaggtcaagcagaagcttctgaaggaattactgttattcgtactgccggatcttcattctcagaaattgttaaccacattaacaaagtctctacgcaaatgcaagaaatgtctgcaactgctgaagagatggctgcaagctctgaagaaatgaacgcagctttaaataatatcgcctctatttcaaatgaagttgctgcagaaacattacaaacagcacattcagctggtgatcaagtaaacaaaatgagtatcgtggctaacaaatcatctgaaatgaaaacaatcgtacaagaacttgaagttctcgtctctcatttcaaaacaaacgcttaaagtgaacctttcgcttgtaatgacacaagcccaaaggtataggaaagaatattttacagtctctcttttttcaatttaaaatatctctttctatctctcattccgtctgctataattcctaaaggaaataagaaagctttattccaactggagtaaagctttctttcaattttttacatttattaattctaatactaagatttcacaaaggaggcttttaatcatatgaattttgtaagtatcagaaaaaaacttatgttcatgatgggaacgatttgcgctttatttggcatcgccttagcttttattttattttttgctattgaccaatctcgtaaagctgaaacattacaaaaagaaatttctccactggcaacagaattgaaagaacgtggagacgcttatcaagtacagctatctgctttaaggggttatttactacaacatgatcaagtcgaattagacaagtttaatgagatgagtaaacgtcttgaggattcaaaagataaacttctttctaatccaaatctttcttcgtccgtaaaaagtacaatggaattagggtctacttggagaaagttcgttgaagaaaaagtattcactcttgcaaaagaacaaaaatgggaagaagctttacaagtagcttcttcagaaaacggaacggtctataaagtaattggtgacttcacaaagtacagtaatgaacaagctaaattacgtgaacaatctattgaacaaattgatcaatcttcactaggaattgaatatgcagtctttctatcacttgttatttgtattgtcgttgcaattattcttgcatggtggttctctggtaaactggtgaaaccaattcaacaaattgacacgaaactaaaagaattggcctctcaagaaggtgacttaacggcacgtctacaagtaaatagcaacgatgaaataggtgctatcgcaacatcatttaataaaatgttagaaaacctacaacatatcattaatcgtgttcaaaaaacatcagtggaagtgcaaaccgcttctgaaaatatgctagaaaaaacaaatacatcacgtgaggcgacattaagagtccaaagctcgatgtccaacttaaatgcaagtattcaatcacaaacttctagtatggaagaaagttcaactgcaatggatgatatggcagtaagtgttcagcgcatcgctgaatctgcttcatctgtagcggaacttgctgttgccacatctgaacatgctagcgatggaagtacggttatccaaaaatctgtttcacaaatgacaacaatacacgaagctgtaaatgctacgtcagaagtggttgaacgtctaatcactcatacgaaatatattgatactgctgtacaatctatttctaatattgctgagcaaacaaacttacttgctttaaatgcttctattgaggctgctcgtgctggcgagcaaggaaaaggatttgctgtcgtagctgacgaagttcgaaaacttgctgaacaatctaaaacagctgcaacagacattaatcaattactacatcaaattcaaaatgatacagaaactgctagctctatgatgtctcaaggccgttctgaagcatttgaaggtatcaatgttattcgtgaagctggtacttctttcacaacaattgtggaacaagtaaataaagtatctactcaaatgcaagatatatcagcaactgctgaagaaatggctgcaagtgctgaagaaatgaatgcttcacttaataacatcgcttctatctctactgaagtatccagcgaaactgccgcaacggcacaatctgctgaacagaaagttatcgttatgaatgaaatgacagtaactgctagaaaaatgaaacaaacagttgaagagttagatcagctcgtatctcattttaaaacagaatagatgttcaaaaaatatccctcttgcgaagagggatattttttcgagctcatttcctgcacattatgctcatttccgttataatgagaatcgatatcattaaagtgtaggaggggctgcttatgtcacaagaagcatttgaaaataaattacttgccaatttagaagctgttattgaccctgaactaggtgttgatatcgttaatcttggattagtttatgatgttacagcagatgaaaataataatgctgtcattacgatgactatgacttctatcggttgtccaatggctgggcaaatcgtatcagacgttaaaaaagtattatcaacaaacgtacctgaagttaatgaaatagaagtaaatgtcgtttggaatccaccgtggtcgaaagaacgtatgtcacgtatggcgaaaatcgcattaggtattcgcgactaaataaagtggaaatttcatcatttgcggatagcgggataaagaaaagacctgactaggatgtcaggtcttttctcttattattttacacctactgcatcataagctttcgttacagcttgtacagctttagagtttttaccgtataaatcttcagctgactgaagtgccgcttgacgcatcattttgaagtcagagtttgcagttaaatatttcgtaagagcacggtagtaaattttttctgtcgcttcacggcccactccagttactttcacaccgtaatgatccccgccttcagatactaagtatgcagctttattgttaatactgctgttaatatgaacgccgccattatcagctgttccagtgtaacgtttactatagtgatctgggtaaccttcacttggttttaatgggtttggaatagacgctgggtctttaagagagcgaagcgcatcaccaggtttatcaggtgtataaatatcagcacctaaatcccagctcttcttctcaaccataacacccataatatcagataacgattcatttaacgcccctgactcatttttgtaaacaaggtttgctgtatgttcagttacagcatgcgttaattcgtgaccgataacatcaagtccagcagataatggaatgaaagtttttccatctccatcaccatacatcatttgcacaccattccaagctgcgttattccaagctgtacctacgtgaacagttgaaataagcttcgcacctttatcatcgaaagagttacgattaaatgtctttttgtagtaatcatatactttccctgcatttacatgcgcatcaactgcagctttatcttcgaagaacttagatttactttcaacttcttctcctgtatatccaagccattgtgagaataaattaaaccagttctcgtccatattttctgcatcaaatgtatgaatgccttgtcctcgtttaccatcaaacaagttgaattgtcctgttttcgtatcttgagcaatttcaaatgattgtctagcacctaatactccgtaaccaaatccagtaatgttatctacagcgttatatttctcaataacatttccattcgttgcatcaacaaaataatgccaatatcctggagctggttttgaaatcgatgccttaactaagtatgcaaggtagtaattaccgtccttttcatatacaaacaaatcttttttcacaccgtcataactctttactttaccaatttctttctcaatatctgcctttgcaatcgtttctgcttgttccgcagtaatgcttgcagctgcaggaatatttttatcatctaaattcggaataacttgtccgaagaatgcttttacattattctctttatcaagtgtaacagtttgatcagaaccgtacacaggaatgttattatgtttctcaactagcttcacatgtgtcgtatcagattcagcgtctttttcttctccaacgatattaaaatgcttttcaatatttcctgctaatttaaacatatctttcttactctctaagtattgaaagaccgtctcttttttatctagtccttccggtgctttccattcttcacctatgtatgcaggtgttttaaattcttgatgatattgaattttttgttcttccgctttcgttgtcgttgccccaaacgctccaaatcccccgacgataacagttaacgctaatgctgatgaaataacttgctttttcactataacattccccattcccataaagatttttgacacttttatacaattcttattttcccagccgatacctctaccgaaaatttgagaaacatttttcagataattccaatccaaaaaagaggacatctatcggatgtcctcttttctataaaccttttattgttttttcaattcaattgctaaatagtgtgattgctctttcgcttgaatgtgaatatcttcttctacagattctgccgcatcccgcataacaaacgtttcaccattgattacactgcttccttcaatttgtacaagatacaattgacggccttctttcactggaaaatgaatttcttttccagcctctaatgataaggaatataaattcgcatcttggtgaatttgaattggtgcatttccttctactgaagataccatatggaaccattcattttcacgcttgctccaatcaaatttaaactcaccatagtttggtttatgatctgcacggtctggtaaaatccaaatttgtaataaacgcagcgtttcatcgcctaaattatgctcgctatgaaatacacccgtgccagcactcatatattgaacatgtccacgctcaatcgttccgcgatttcccatgctgtcttcatgtgttaaagcaccatctacaacgtaagaaataatctccatatcacgatgtggatgcatatcaaaaccagtttgcgccgctactagatcatcattaataacacgtaacgctccgaagttcatgttatttggattgtagtaattggcaaaagaaaaatgaaaatgtgtatttaaccaaccatgatttgctctgcccatatttttatgatcaacttttctaaacatatccttcacctcatactatctcgaattcgagatttattttaaaattttttcttactgtaacttttttaatagtgttaataactgcttttgttcctctatatttaaattatgaaacttctctgcttggaacgtttcttgaggtgggacgatttcctcatataaagctcttcccttttctgttaaagaaatatatttcgtagtaccctcttgttcacgcaaaatccactcaagctgctccattttatttaaaagctgcgttacatttcctttcgtaacaaatagcttatttccaagttcttgctgcgttaaacgattatatcctccaacttgagctaacacatcaaactgggcggcagatatattccattttttcaaatgctgattcgtctcacgaatactcttattataaaagcgtgacaaacgaaaccataatagtagccctagtctatcttctgttttcatttcatcacctcgctcgtttcatatcattagtttagaactaaacttaataaaagtcaaatacttatttttaataagcataaaaagcacagcgctatttctccactatgctttacattaactttctactcttatattcatccaatttcctctccgcgaacttcctcgcatctttttcaatccaccgctcttcgtaccgttcacttcccacatacaatatatctctcttatgctgcatcgcatggcggaattcatgcagtagcgttttgagaacttgatcatactcttcccacatacaaacgaaaattaattgcttttctttatgataaaaaccacctactgggaataggaactcttcttcctcttcccctaatgatagaagcacatcatttgcatcacacgtatcacaaaaaataacgggcgttttacatacttcaataagagaaaacaaatcctctctcaactttttgacatcccaaggaagctccgaatccaacacataccaattctctacctgttgatatacattttgaaactggagttccatttctctttattcccctttccaagcaccctttttctatatgtatgccacaatatagtaaatattaaacgtattctttcatccttgaaaaaatgccaataaaaaaggaatctacgtcgacatagattccttttctgtaatcacttttttttcatcattttttttaatacaaaataaccaattgcactaacaatagcaacaagtgcaaagtatttcacatatggccccgcaactttattaatactttcccactctgttcctaatttaaaacctaaatatacaaacacaattgaccacggaataacagctaatgtagttagcgtaataaacttagcatgtgacattttcgcaatacccgctggtatcgaaatagcatgacgcacaaccggaataaaacgtgcggtaaagataacgccagttccataacgattaaaccaatcttcagcataatcaatatgtttcttctgaattaaaatatattttccatatcgctcaagaacaggtcttcctccatatcgaccaatccaataaatgaatagttgtgcaattacaccaccaattgtaccgaacgcgacagcgccccaaaatgtaatgcttcctgttgatactaaatagcctgcataagacaatacgatttcacttggaataacctctagcattaatccaagcataattccccaataaccaagtccttctaaaaaaactaaaaccgaatgaatcaactctcctaacatcatgtacctctctttactgttttcatcaccaaaataaaagtacaagcaggaaatatcttgtacttttatttttttaatttagttagtcttcgtatcccacttaaagattttatttaagaatttatatacattcttcgactcttttgtcagaagtgggcctaaaatggatagtataagcacgtatagtgctgagaatggtttcagtactgacattaaaccaccggcgataccgatattagccataatgatggagaactctcctctggaaacgattgttaatccgatatttgttgatgctttatgagataatccagcttgtcttcctgcaatcattcctgctacaaagttaccgattatcgtaagaaggacagcacctaacgttaaccatatcgctccgcctaatgagaacggatcaatacttaacccgaagctgaagaagaaaatagctccgaaaaagtctctaaatggaacaacaagatgttcaattcggtcactatgctctgtctcagagaaaactaatcctagaagaagtgctccaattgcttctgcaacgtgaattgtttctgaaaaaccagcaatgaagaataacgaagcaaatactacaataataaagatttcatctgagctaatattgagcaatttatttaataacggcgtagcctttctagctactataaagaatagaagcatatatcctaaagcaattccaattgaagtaagggcacctaagaaggaagcgtgatctccaagtactaaaccagaaacaactgataaatatacagcaaggaatatatcttcaaacataataattcctaaaattaattcggtttcattattaccagttcttcttaagtccactaacactttagcaacgatagcgctagaagaaatcgtaataatacccgcaataattaagatttctagtaatgggaatcccattataaatccgtataacaaaccaagtgaaaagttaattaaaatataaatcgttccgccaatcgcaatagagcgtccagatttaattagttttttcattgaaaattctaatcctagatagaatagaaggaatagaaccccaattcgtccaaggaaggaaattacacttgcactttcaataaatttgagatcgataacacctattgtcggtgcatgcggtcctactaacattccaagaacgattagaaaaggaattactgagaatttaaatttcccagcaattactgctgcaattgccactaaaactaaagctgtaccaacttcaaaaattaacgtatccatctaatcagtcccccctatttgaaagtaattcattaatgatttttttaatttcttctctctcacctgaaactacaagcatatctccttcttcaattactgtttctggtcctggattaaatagcttcttcatgttcttcttcataaccgcgattattgttacgctatatgtttttcttatttcaagatcgccaattgtttttccgattgctggagctgtattctccactttgaaccactcaatcgctaaaccttcaaaaaccatctcaacattttctaacgccctaggcttatataccattccacctaatattgcagcgatttgtcttgcctctgagtcacgtagtgaaatacttgagatgctttcttcatggtctgaatcaaaatgatacatttctctacgaccatcatcatgaatgacaattaccatcttttcattacctttcgtaacgatttgaaacttataaccaatacccggaagttcactttctctaatattcatttttagctcctccataacttgtttattttaattttctgtttttctgtcttttattcatccaatcaactttagaaattctaaccactcaggatatttgtgatttggaaatcttttattgtaataataagtggaccctaaaaagatacttaaagatgtaatgataaaaaatatattacttctcattttcaaactctcaaggcttactttccataaagaatcttctttcaaattatccccactttctcgctttaaatttagttttttaaaatgtaaataattctaaaaatattacgatgtaacataatcataacacaaaaatgttttaagtaacataattttttagaaaaattgattctcgtatattttttgcatataattttcttattacgaaaaaaaggaagtgtattatatggttgatatctttagcagattccttgaggtaacgaataatattttatggtcatatattcttattgcaatgctaatcggcttcggtctttacttctcttttaaattaaaatttgtccaaattactcatttcagtgagatggtcagcttaattagtaaagggtttaatcgaaaagaaaaaaagaaagatagcatctcaccattccaagcattttgcttaagtgcagcagcacgtatcggtatcggaaacttagctggtgtagcattagcaatttcaatgggtggacctggcgcaatattttggatgtggtttatcgcaattatcggagcagctactagttttgtagaatgtacacttgcgcaaatttataaagtaaaagatggaagtaggttccgtggtggaccagcatattacatggaaaaagggttaaacaaacgctggatgggcgtctggttttcacttcttattacagttgcgtatggattaattttcaattcagtgcaagcaaatacagtaacaatagcgtttgaaaatgcttttggactagagcgaacaatcgtaggagctctattagccttattagttgcagttattatttttggtggcattaagagcatttcacgtattacagaaatgattgttccgccaatggcaatcgtttatatcggcgtggctatttttgtcgttattaacaacttcagtatgttaccaagcattttcatggaaatctttaacggtgcattcggtttagaccaagccatcgctggtggtattggagcagcaatcaagttcggaattcagcgcggtttattcgctacagaagcgggaatgggtagttctcctaatgcagccgcaacatctgatgtatctcaccctgtaaaacaagggcttgttcaagcgttaggcgttttcgtagatacattcttagtatgtacatcaacagcatttatcgtattatgttctggactttacaaaggatcaaatttagaaggtatcgaattaacacaaaacgcattaagttcacaaattggaccgtgggcaagcactttcttagcgattattattttcctattcgctttcagttcacttctaggaaactactattatggtgaaacaaatatcgcattcattaaagaaagtaaaacatggttaatgatttatcgtgttgcagttgtcggaatggtattcttcggatcaatcgctgctcttaaaacagtttggagtttagctgatttattcatgggactaatggtattcacaaacttaattgccatctcattccttagcaaatttgcttacgctgcattagtagactatttgaagcaaaagaaacaaggaaaagatcctgtcttcgttgcaaactctatccctggcttaaagaatacagagtgctgggatgggcaagatgtagaagaaaaacaaaaggctgtttaacaaataaaagcggaagcggctcgttcagaatcgcaggacacttcaagctctcgaccttgaagcgctttttgcttcgagcgagagagcgaaatgaccggagattctagccgctggagctggatatcaattaaaagcggaggtgacttgctcagaacaggagggcattggagctcctgacgaagaggcgttctttgcctcacaggaaggcgcgaaatgaccgactggtctagtcaccggagctggatatcaattaaaagcggaggtgacttgctcagaacaggagggcattggagctcctgacgaagaggcgttctttgcctcacaggaaggcgcgaaatgaccgactggtctagtcaccggagctggatatcaattaaaagcggaggtgacttgctcagaacaggagggcattggagctcctgacgaagaggcgttctttgcctcacaggaaggcgcgaaatgaccgactggtctagtcaccggagctggatatcaattaaaagcggaggtgacttgctcagaacaggagggcattggagctcctgacgaagaggcgttctttgcctcacaggaaggcgcgaaatgaccgactggtctagtcaccggagctggatatcaattaaaagcggaggtgacttgctcagaacaggagggcattggagctcctgacgaagaggcgttctttgcctcacaggaaggcgcgaaatgaccggagattctagtcaccggagctggatatcattaaaagcacaagcggctcgttcagaacaagagccatatctcaaacaaaggccctattacttcaccgtaatagggccttttatttacaacagttcataatttgttcaaattaattccagcaaaagggttgatttatagagattactagattataattattataaattagtaattgatatcacataacaactcaaaaggagattgatcataatgaacaaacaagtaatcgaagtattaaacaaacaagtagcagactggagcgttttattcacaaaacttcacaacttccattggtacgtaaaaggacctcaattcttcacattacacgagaaattcgaagaactttacacagaatcagctactcacatcgatgaaattgcagaacgtattttagcaattggcggcaaaccagtagcaacaatgaaagaatacttagaactatcttctattcaagaagcagcatacggagaaactgcagaagggatggtcgaagcaatcatgaaagactacgaaatgatgctagtcgaactgaaaaaaggcatggaaatcgctcaagactctgacgatgaaatgacatctgacctactactaggcatctacacagaactagaaaaacacgcttggatgctacgtgcgttcttgaatcaataatagatttaaaagcggaagcggcttgctcaaaatcgcagggcattggagctctcgaccttgaagcgctttttgcttcgagcgagagagtgaaatgaccggagattctagccgctggagctggatatcacctaaaagcggaggtagcttgctcagaatgtgagggagatggagcttttgacgtagaggcgctctttgcctcgcaggaaaaagcgaagccaccgaacattctagctaccggagctgaatattactttaaagcggaagcggctcgttcagagtcgcttttttctatagattgatcgcgcatgctggtacatgaaatttatatcagcgatttttccaacatatcggcgattctccccaatatatcagcgattatccaattatatcggcgattccatccaatatatcagcgatttttcaattatatcgacttatcgacaaatcacgacaatattaacacgcctctctcccctacttttatcaatatattacaatctcatctatgttaaaatataggaaacaccctttagcttttccaaattcatcatttactacttaaatgacgggagtggttcagttgaaagactacttaattagagcattttttgcgttaataacagttgggattctcttacttatagctaatattttcaatatacgtgtcgaggttaaggactatgctttcctcgttgtcgtagcaattggtggcggctggggtggctggtacctgtataaaaagcaaagcaatcaaaataataaaggcattccaaagtaatacggaatgcctctttttattgccttctgtaataaataatgaaattcagaccactaatacaaccaatcgcaataaacatacaaaacgattgtggatctccacctagattatactcatcaacgataaacccagacataaacaacgttatcgcggaaacaccgatacacaataccgagataaaccaaagcgaaaattcattaatcaactctttcttctgtctcaaaacaattagcataacaagaatagatgctgctaaaatacttttaaagaccggtcttaaatacacaaactcctccatctctttctccttttccaaaaacattacatctaaaaattaacatatttaaccaaattaaaaacacatgccatcttaaattaaaacgacatgtgtttccgtatttgctatgatagttgcttccacttcgttcccaaaacaggacgctcataattttggattgcatgaatcagtttatctgctgtctctgctgaaacgatcaattctttatttgatggattcataaatccttcttctgctgcacgttcaaccatttgcaaaattggtccgtaaaaaccttttatgtttaataaaccaaccggcttattatgtataccaatttgtgaccaacatacaacttcaaatagttcttcaaacgttccgtatccgcctggaagcgcaataaaagcatctgcaagctctgccattttagctttacgttcgtgcatcgtctctacttcaattaattctgttaatcctgtatgcacaatttctcctcggaatagaccgcgcggcataacacctgttacacgtccacctaaacgaagaacttcgtttgctacttctcccattaatccgacacatgaaccaccgtatacgagctcatagtcgttctcaacaaacattttacctaactgaattgcctgctctttaaattctggtctctctcctaaattagaacctgcaaacacacaaatctttctcatccctacaccccgaaactatatattgttatgatacaatgaacattgtacaacatattgaggagatgaggaagaaatggatatcgttgcatttcaaagatgggttgaggaattttacgaaaaacgaagctggtcacagtataatgcctttattcgcttaaatttcttaaccgaggaagttggggaagtttcacgagtcgttcgtgctattgaaattggccgcgatcgccctgatgaagatgcgaaaacagaagaagagctaaaacaagaactaaaagaagaacttggcgatgtactatctaaccttattattctttcgcaaaaatatgatttagacttacaagacattatggatgcacacgtcacaaagctttcgaaaaggttcgaagtatctaaatgagaatattatcaattatggtataatattattgtcacaatactaagggggattttatgttatcaaaaaaattgcacgacgcattaaatgaacaaatgaactttgaattttactctgcccatgcttatatggcaatggctgcttactgtacagctgagagctatgatggattcgctaactttttccttgtacaagctgaagaagaacgtttccacgcaatgaagctttacaactatattaatgaccgcggagaacgcgctattattactggatttgataatccgaataacgaatacaaatctgtattaaacgcttttgaagtcgcacttgagcacgagcgtgaagtaacgaaacgtatttacaacttatctgatatcgcttgggacgagcgtgaacatgcaacaattacattcttaaaatggttcgttgacgaacaagttgaagaagaagcttcattcgatagcatcattcaaaaattaaaacgtattacaagcgattcaaacgcactgtttatgctagatgctgaattagagaaacgtacatttacgcctccagctgaataatatttcaatcaccttaatacatgaattaaggtgatttttttgtttgctctctatcttaaaatcaccttaaatttcctcatatttgacatagtgccagctataaaatggtattattttcaatataaaaacgaatatacgaggagaggaaaaatgaatcaacgtgtagaagctgttgatgcaattcgtggtttcgctttgtttggcattttactagtcaatatgacattaattcaattcgggttcttcaccagtgaaaaaccaacttatctattcggcgatcttgataaaggcgctaattggtttattcaattcttcggcacacataactttatatccctattttcttttctatttggacttagcattattttgttacaaaaaagtattatcgcaaaaggaaaaaaattcttccccacatacataagacgtattatcattcttttactactcggctacattcacggcacttttgtttgggagggagatattttatttgcatacggaataattgggattttcttaatgatgttcatcaatcgaaaaccgaaaactttgctcatttgggcgattattctactcgcacttattacacttatgtcttatcaaactgatccatctacaaatataaatgattttgcaccttatactgaaaaagaacataaagtccatcaaactggaagctatatggatcacgtcaactttagattgactgaaaatccttttgattacatgggaattgacggtgcattcggattatttttcatatcagttttcgcaataatttttatgtctccactgttcctactcggaatgtatgtagggaaaaaaggctggctatttgaggtcaataaacatatacctggtgtcaaaaaaatatggtttgccaccggtctcttctcttttacaattaaaatcttagctatgttcgtaaagcacccgcttttaattatgttacaagatggccttacaccagtaactatgaccttcttttacggaagcacaatcattttattattccattacaaaaaagcaacccgtctactaacatacatggcgaacatggggaaaatgtccgttagtaattacttagcgcaatctattatcgcaacaactattttttacgcatatggatttggcttatacgggaaaatcggctatttcttcggtattcttttaaccatcggaatttatacgattcaattattcgttagcacctattggctccagaaataccgaatggggccagtggaatatgtgtggagactgggaacttatttagagaaaccacgttttaaaagaaacttggataaagcaagttaaacaaaaaaagcaatgagcctacgctcattgcttttcttaatttattaaagcataaccccaacgataatcgctgataatatacttactaacgttgcaccgtatacaagttttaaaccgaatgatgatacaacgtttgcttgtttgccatcgatactcttcgttgcacctgcgataattccaatagatgagaagttcgcaaatgatacaaggaagatagataaaatacctactgtacgagctgataaatcaccagctactttaccaaggtcaagcattgcaacgaattcgttcgttactaattttgttgccataatttgtcctgcttgtagcatctctgatgttggaatacccattacgaatgctaatggtgagaagatatatcctaaaatgctttggaatgtgattccgaaaattgaatcgaatacaccgttaattgctgtaattaatgctacgaaaccgattaacatcgccgctactgttacagcgattgagaaaccaagcataatatattcgcctaacatttcaaagaatgtttgtttcttgtcttcttgtaattctaaaatatcgtcttcttcttttacttcatatggattaatgatatgaacgataatgaatccactgaataagtttaatactagtgctgttactacatattttggatcaatcattttcatataagaaccgacgattgacatcgatactgtagacattgaagatgcacaaagtgtgtataaacgatttttcggtaatttgcttagttgatcttttactgtaatgaatacttccccttgaccaacgattgcagctgctaccgcattatatgattctagttttcctaaaccgttaactttacttaataggaaaccgactgcacgaatgataatcggtaaaactttaatatgttgcagaatcccgattaatactgctaagaaaataatcggtaataatactgttaagaagaatggtgcttgtccatcgtttgctagaccaccaaatacgaaattaaccccagcttccgcaaattttaaaatagcgccaaatccatctgcgatcccttttactaatacgaatccgacctttgtatttagtaagaaatacgcaagtaccaattgaatgacaagcataagtgcaattggtttatatttaattttcttacgatctgaactgataaggaaacctagtacaaacactacaagtaaaccgactagaaacattacgaacttcatatgtgaatcctccacttctcccacgagttattggtcgtataacgtataacgaatgacgtctgaccattgttgttaaaaaatttaaaacccctaaaactattcaactgtcatctaaaatcagtaagcgtttacataaattgcaatttataaaaggtagcttcttctctcctaccataattgaaagtctgaaattgataccacctacaaatcaaattgtaagcgttatctagacgaaatgcaatataaattttaaaagatttttatatgttaatatattcctaattaattggttttttcatgcaaatttaccataaaaatagccctagctatgagctaggaccatctttttttataacataacaccaacgataatcgctgatagaatacttactaatgtcgcaccgtacacaaggcgtagaccaaatgatgatacaacatttgattgattttcatcgatacctttcgttgcacctgcgataattccgatagatgagaagttcgcaaatgatacaaggaatacagaaaggataccaactgtacgagccgataaatcaccagctacttttccaagatcaagcatcgcaacaaactcgtttgatactaattttgttgccataatttgtcccgctgttaccatctcagcttgatgtgtagcatcctcctgcgattagcaagagggtagctactgcccatttcgggtacgataggtaagaatttgatgtttctagctagctttttagaaagaataacgttttttgacacttgggggtagtgcaaattcttaagttgatgggcatggggtaggaacagattataacattttattatatacgaggtttaaagaagaattaagtaaacaagaaaatgcatttttagctacgaaagaaacattcaaatcagcaggtaaaactgtattatatagcggaatagcggtgctaattggttttgcatcacttgctttagcaagttttaaattatatcaatcgacttcagcggtagcaattggtgttttagtattattactcgtattaacgactttaaatccatttttcatggtgcttttaggaaaaggaatgttttatccagttaaaacatttaaaggtcatgaggatagtcgcttgtggggattctttgcgaaaaactcagtagcaaggccatttgtcgctttaatcatcgtattcgtaatatcgattcctttcgtattaaaatactctaatacacttaattacaatgatttatttgaagtggataataagtatgaatccaagatgggtattaacgtaatagaggatcattttccgcctggtttctcttcaccgagtacattagtcattcaatctgataaaaagctggatgaaggaacttctctacaaattttagacgaattaactgataaaatttcgaaagttaaaggtgtgtcagaagtatatgcaccaacacgtccaactggtgagaagataaaagaattatatttaaataagcaagcgggagaattgaatacaggattaggagatgccgatggtggcataaaggaaattaatgatggattaacagatgcgaaaaataaaatgggaagtaatgattcaaatagtcttgcgaatgttcaaaaattaattgatggaacgaacgaggtgaaaaacggggtatcagcattaggaacagctttacatcaattatcaaatggcataaacgacggtgcacaaggagcacagcaaattgagagtggtttagcttcagtaaacgaaaatataaatgttctatctaatgcaacgtcgcagctgcatgctggttatgcacagttagaaaaaggtttaaactcttacgatcaatacttcggaagtatttctcaagcgattgatggtgcgaaaaagggatatgaacaaattgaaatgttaatgaccaatttcgttcaaacgaaaccagaattagcgaatgatccaaacatacaacaaacgataggaattgctaaagaggctcaaaagaaattaagcgtactttcaaatgaattaaatcaattagcaacacagcacaaaacggcgatgagttcatttaaagaagcgaatcaatcgttactgaaagtggataacggcttaaaagaaatgagcaatggagttaataagttacaaaagggagcagccgatcttaaaaatggattaaatgaaggttcttcaggttcaaaacaaattgcaaataaatcagttgagttacaatctggattaacgaaaataaacgatgggcaaggacaacttttaacgggccttaaagacctgcaagaaaagatggggcaattacaatccggtttatctaaaagtacagaagggcttggaaaagtaagtaatggcctgcatgacgcacaaaaatatttaggggagctcaatgaatcgaagagctctgagaagttttatattccaaaagaagtgctagagggagaagatttccaaaaagcattgaacacgtacatgtcgcaggatagaaaaattgctaaaatgactatcattttagatgtaaatccgtattcaaaagaagcgatgccaattattcaagaaatcaataaaacaatcgatggcactgtaaagggaacggaattacatgatgcgaaaacagcaattggcggaacaacagctagaaacgttgatttaaaagaagtaacagggcaagatttcttacgtacagctacaattatgttaattggaattgcgattgtattaatcgtaattacacgctcattactaaacataatatttattattggctcattactattagcgtacttcgcatcactcggtataagcgaacaaattagtgcacatgtattacatgtagattcattaagctggaatgttccattctttagcttcattatgattgtcgctttaggagtggattatagtattttcgtaatgatgcgctataacgagatagaaggggattcggtaacgaaaattgtaactgcatctcgtcatataggaggagttgtattatcagctgcgctaattttaggcgggacatttgcagcattaattccatcaggtgtattaacacttatacaagttgcatcagtagttggcgttgcacttcttctattagctttaattgtgatgccgatattattaccggcgttaatagggttaacgagtaaaatgaagagttacaaagagaaaataataaatacgaaataagaagagactgtagggaatgatttctctacagttttttcggtatataatatttcagatgaaaatgaatccgatatattacagaatgagcagtgaaaggttatatgagaaagaggtcgatgatatacatacaatagctaggggaatggacaaaaactatccgatttcattgtagaaaggtaatcaaccgttgctattcatccatcttctactatataatagctatagtctacaataattgagtcgtaatatgcgatttcttaagacaatcggtgagaaaacgctgaaataagcggtattagtaggaggacacaaatgattacagtaagtaacgttagtttgcgtttcgcggatcgcaaattatttgaagatgttaacataaaatttacgccaggtaactgctacggtttaatcggagcgaacggtgctggtaaatcgacatttctaaagattttatctggagaaattgaaccatcaacaggtgacatacatattacgccaggtgagcgtctagcagtattaaaacagaaccacttcgaatatgaagagttcccagtattagaaacagtaattatgggtcacacgcaactttacaaagtaatgcaagagaaaaatgctatttacatgaaagaagactttagtgatgaagatggaatgcgcgctgctgaacttgaaggtgagttcgctgagcttaacggttgggaagctgagtcagaagctgcaattcttcttaaaggtttaggtattggtgaagaccttcatgataagaaattgtcagaattaactggggcagagaaagtaaaagtattacttgctcaagctttattcggtcaacctgacattctattattagatgagcctaccaaccacttggacttaaaagcgattcaatggttagaaaacttcttaatgaactttgaaaacacagttatcgtagtatcccatgaccgtcacttcttaaataaagtatgtacgcacatggctgaccttgatttcggtaaaattcaactttatgttggtaactatgacttctggtatgagtcaagccaattagctttaaaattaacacaagatgctaataagaaaaaagaagagaaagtaaaagagttacaaaacttcattgcacgctttagttcaaacgcttctaaagcgaaacaagcaacttctcgtaaaaaattattagacaaaattacattagatgatattagaccgtcatcacgtcgttacccattcgttggcttcacacctgagcgtgaagtaggaaatgacttattaactgttgaaggtctttctaaaacaattgatggtgaaaaagtgttagataatgtgtacttcactttaaataaaggtgataaagttgcatttatcggccgtaacgatattgcgatgacaacattatttaaaattcttatgggtgaaatggagccggatagcggttcattcaaatggggtgttacaacctctcaatcttacttcccaagagataactctaagtactttgagaacagtgattacaacttagttgaatggttacgtcaattctctccacaagatgagtctgaaagcttcttacgtggtttcttaggccgtatgttattctcaggtgaagaagttaagaagaacgtttctgtattatctggaggcgaaaaagttcgttgtatgttatctaaaatgatgttaagtggtgcgaacgtaatcacacttgacgatccaacgaaccacttagaccttgagtcaatcacagcattaaacaacggtttaattgcattcaaaggtacaatattattcacatctcatgaccatcagttcgtgcaaacaattgcaaaccgcattatcgaagtaacaccaaacggtgtaatcgataaagaggctacttatgatgagttcttagaaaatgaggaacttcaaaaacaagtagatgcaatgtacaaaggtcaataatatataatgaaaaaactcgttctttttagagcgagtttttttgtcgagaaaacgtaacatcgctggtcggtcaaatgaataattattcaaatataatattaatgaacaggagaattctttcatgtatggaagggatgtaatgactttaagatttaaagagttagttgaagaagggaaatgtaagtggagtaatataatcaaatcgtattattttgtcatgtgaaatatgtaccaaatttggagatagaatagtttgcgaatgagtttataaaggtatatagtatggggtgtcataattagtggatgaatcttgggagaaaacaggaaatgttacaaatttattttgttaaatagaaaccaaggtcaaaatgtctagaaagaaatagttgaataaatactagcttcaaattataattactaatattcttcatatagttaaataaagataatctatttgaagaagaaaatttgaatagagagacagacttataaaaaataagccttggatgatcaaaagaggtggagaaatgaaacagttcttattaaagagcaaaagtgtgttaagcaatcattttggattctttctgtttgccgttattttattgtggctcaaaacatatgcagcttatgtaacggaattcaatttaggaatttcaaacacaatccaaaaattcttgctgttttttaacccgcttagttcagcagttctatttttaggacttgcattatttgcaaaagggaaacgatcttatatttggttaattatcattaatttgttattgtcgattcttttatacgcaaacgtagtatactatcgctttttcagtgactttattacgttcccgacattaacacaaacgaataactttggagatttaggtggtagtattcttgcgttgctacatctttatgatccattatacttcttagacacgattatattaattgtgttagtcgcaacaaaatttgcaaatccaaaaccaattcgtgttgcgaagcataaattatctctagtatttgtagtaggtattttattattcagtgttaacttaggtcttgcagagtctgaccgtcctgaattattaacaagaacgtttgaccgtaattatattgtgaaatatttaggtgcatacaactacacaatttatgatggaattcaaagtgcgaaagcatcaacagaacgagcattagcggatggcgataatatgacagaagtacgaaattatttaacatcaacttatgcaagtccaaatcctgagtatttcggtaaaggaaagggaatgaacgtaatttacattcatttagagtcattccaaaacttcttaattgattacaaattaaatggtcaagaagttacaccgttcttaaactcatttacaaaagatgcgaatacactatactttgataacttcttccatcaaacaggacaagggaaaacatctgatgcggagtttatgttagagaattcaatgtttggcttaccgcaaggttctgtctttacaacgaaatctcataatacgtatcaatcagcaccagctattttaggacaacaaggatacacatcagcagtattccacggtaactacaaaacattctggaaccgtgacgatatttataaatcatttggttttaataaattctttgatgcgtcatactacgatatgaatgaaaaagacgtagtaaactacggattaaaagataaaccgttctttaatgaatctattccgttattacaaacgttgaaacaaccgttctatacaaagtttattacgttatcgaaccatttcccttatccaatcgataaggcagaagcaacgattgaaccagcaacaacaggtgattcatcagtagatacgtacttccaaacagcacgctatttagatgaatctgtaaaaggcttcatcgattacttgaaacaatctggtttatatgataactcaattattgttatgtacggagaccattacggtatttcagataatcataatgcagcaatgtcaaaagtaatgggtaaagaaatgaactcatttgaaaatgcacagttacaacgtgtaccattaatcgttcgtgtaccaggagtgaaaggtggcgtacaacatcaatacggtggtgaaattgacgttcttccaacgctattacacttactaggtacagatacaaagaattatgttcaattcggttctgatttattatcaccagatcataaacaagtcgttgcgttccgtaacggtaactacgtaagcccaacagttactgcactaaacggcaaatactatgatacaactactggaaaacctgtagaatttacagatgaaataaagaaaaatgaacaaatggttcaaaactcactaaaatactctgaccaagtcgtaaatggtgacttattacgattctacacaccggaaggattcactccagtagatcgttcgaagtataactataacaaccgtgataaaaacaaaacgaaggtaaaaacgactccggaaggggaagctaaataaataataaaaggcgctattcatatgaatagcgccttttatttgtaaatataccatcattatgagacaaaaccagctgttgctttttgttttgcctttccgaagaaaactacaccgacgatgataataatgataaatgcccatttaacgaaagggttactttcgaaaaatccagcgaaccatttctcatctacaatcattttcgcggcagtataagctaaaacggctgctccgatcgtaatgatgacaggaaaacgatccacccattttaaaattaatgtgctgccccatacgactactggaatagacactaatagtccgatgattactaaagaaaagttaccatgggcagctcctgcaacagcgagtacattatcaatgcccattaacgcatcagcaataataatggttttaatagcagaccaaaatccttcttcggctttaatatcatgatttttgccctcagcgatcagcttgtaagcgatccaaataagaagtacaccaccaattaggagtaatccaggtatttttaataaccaaacgacaactaaggtagcgagagccctaatagcgattgctccaatggttccccaaatgataactttcttttgttggtctttcggtaatcttcttgctgctaatccaattacgatggcattatctccggctaacactaaatcgattacaataatggcaagcaaggcagacaaatattcaggtgaaagaaaatccatatacatatcactccttaagagtaatatgtgctaaagtgttgataatataaaaaaggattgaaattgtatattcaatccttttttgactgtattctgatatgtatgtttttattttgaataagtcgcttttgtagtttttacttatcgcgtttctttcttaaattgattccaagtttcttcagtttgcactataaatacgattatataacatctacttatttaaactaggttaaagatagcatgtgatatttcaaagttaaatttatttgataaaagggaagggacgtataatattgatatggtgcaagcgtgtataggttttctctataaggaaattctaaaaacgataaaaaagacttgataacctactagaggggatcaagtcttttcattacatacgattatcatgccagaagtttaatgggaagtgttcgttctcattatatgcttctaattcatatcctttttctttcagtcctttaataattccaggtactgcttttactgattgtggatgaatatcatgcataaggataacttctgttgggtttgtagaatgagctagaacgttttctacaattttagctgatgcagcatcaacttgcattttgttatatttccagtctaaagaatcaattgtccaatcccaaacttttaagccattgtctacaactttgttgcgaagagcttcgtttaatcctggcatagagccgtaagctggacgagttaatactggtgatttacctaaaacaccagcgattaagccttggtcttccttcatttcatctacgtaatgaccttcagtataaagtttcttgtagttatgagtcatactgtgcatcccaacgtagtggccttcagcatcttcgcgttttacaagatcagggaaagcttttacgtttgaaccaattaggaaaaatgttgcttttgcattttctttctttaacatatctaaaagctcagctgtgtattttccaggaccgtcatcaaatgttaaataagcgacttttctaacttgcccgttataatgttttggagcttctttcggagcaagagatgtttgaatctcacttacaagttgaacagattttgcttcatcctctgtactagctaaagcagtatgtactgatccaaaagccgcttcgtatgtgaataatactcccgcacaaactaacatagccctttttactaaagttgtcattcgaattccattgtgcataattttccttctctctataaaagttctactctactatattagcaattataggtagggaaatgcaaagaaacttttttacacttgtaaaaaagtttacccaaaagtatgcaagattttatatcaattgcagttttgaaaaatagaatgaatttaaactttattatttaaactttcaatcaccaaatcatactttcgtatcacttcgttttcgttccaaatattgattcgaatatttttgatttttattaaaatattcgtaaagaaacaattatatgaaaaaaggagcgggaatatgaataattatatttgcactacatgtggagtacagtatcccgaaaatgaagaagcaccttctcactgtaaaatttgtaatgaggaaaggccatatgttaatccaattgggcagtcatggataacattagaaacaatgcaaaatagcaatttatactaaagacctattgtttattaactaataggtctttcaacttaggaagctcacactaatgagggatgttaaagggaatatatctaacctatactaattactataaagctttggaaaatgaaaaggaggagatttgcatgaagaattgggttcaatttagaattgcaagaccaacagataaattggaagaagtgattagtttttatgaaacaggattaggattaaaacgtataggggaatttcacaatcatgaaggatatgacggggttatgtttggattaccagatgaagagtatcatttggagtttacttcacatgttaatggaagtccatgtccggcaccgacaaaagataatttactagttttttatatgcctaataaagatgaaattgaaaatatagtaaatcaattaagtaatatgggctaccatgaggtggaaccagaaaacccgtattggatagagaaaggaaccacaatagaggatccagatggttggagaattgtgcttatgaatgcatctgaataaggaaactattttcatatgaaatagagtgtagcaaaatgatttagacataaatccctacagcgtttgtagggatttttatataagaaaatcttattgagagagttattaaaatgtagaaagtattttggctaagaataaatgtagtaaacataatttatgaaggaggtataaaagtatgatagtaaaccattttaaggagttttctaaacatgttggaaatacacatctcattaaaagttctttcgtagtttatatcttattctacggaaaattgataccatcaaaaaactgtatgtttaacatgtatagttttttgatggtgtagctgtgcaatgtttaaaaatttcacataccgtattttaaaaataaatataggaaaaccaaaaagtaatgtagaatatatcgtacatacatatatacagtcaacataaaagataaagaggtgggtatatgttacttgaggaagtaatgcagcaactagaggaatatggaacagaacaaaatcgaaaaacgtataaaaaccacggagcgaaagagccgttatttggagttagttttgcgaatttaaaattgttaaaaaagaagataaaaaaagatcatgatttagcagttggattgtgggaaacgaaaaatatggacgcaatgacattagcaacttatattttagatccgaaaaaaataacgacagaacagcttaatagttggattcaggatgttgattattactgtttgatggatgttcttatgacatctatatgtacttcgccaattgcaatagaaagaatggaagagtggacaaagtctaatgatgaatggattggaagagctggctggtctttattagcaaatatagcgattaaaaataaaacgttacatgatgatttcttctctccgtacttagaagagattaaagaaaatatacataatgaaaaaaatagaaaaaaagaagcgatgaatagtgctttaatcgcaataggaattcgtaatgaagacttagagcgacaagcgattgaaattgcacgtgaaattggaaaagtagaggttgatcacggtgcaacatcatgtaaaacaccagatgcagaaagctatataaaaaaagcgagagaaagagctgaaaaaaagaaagtgaaataagaaaagaggatcggttatgaaagcaattgacgcagcacaaaacataattacattacaattttctaattgtgatgtagctttactcggcggaagcgttgtacgaggagaagcgacgaaaacatctgaccttgatattgtaatagttgaccaaagtttaacttcttgctatagggaatctttctatagtaatggatggcctgttgaggtgtttgttcataattttgaaacatataaaacctttttcaaaatggattgtgatcgagggagaccgtcgttaccacaattagtttcggaagggattgcattaaaaggggaaaaggaaattgttgagaaattaaaaaaagaagcgaatgatttactacataaaggaccagctaaatggaccgaagaaacgattaagcagaagcgatattttattacggatactttagatgactttattggtgcaacaaaaagagaagaagaattgtttatcgctaatttattagcggatttagtacatgaatatgtattaagagtaaatggtaagtggcttgggagttcaaaatggtttattagagtgctaaaaagatatgatgagcaatatgcaaacaaatttgtagcggcttttgattatttttataaaacgggagagaaaaatgaattaattcattttatagaaaagatgttagaacagtatggtggaagagtgttcgaaggattttctattggtaaataaaaaggggagagaaaaatgaatgtaccatatgttcaattaagagaattgacactagatgatgtagaagatcgctatcaatggtcattagatagagatgtaacaaagcatttagtcgtaccagatcaatatcctccgttcactcgtggagatacgagaaactggattgaagcttgtataagccgaaaaaatggttatgaacaaagggcaatcgttactgaggcaggtatacatattggatgggtagaccttaaaaattttgataaaacaaataaaaatgctgaactaggaattgcgattggaaataaagactattggggtaaaggatttggaatggcagctctaaacagcatgttacaaataggtttttctcagtttgaattggagaaaatttggttacgtgtagatgaagataatacaaaagctaaaaagagttatgaaagtgccggatttgtatgcgaagggttaatgagaaatgatcgattgagacaggggaagttcattcatcgcaatcgttacagtatattaaaagaagagtatgaatcaaaaaaagtagcctataaaaatattatgtaaattaaaaaggggaagataaaatgattcgattacttacaaaagcggatgcaaaacaatattgggagttacgtttacaagcattacaagtaaatccagaagcatttataacgacttatgaagaagcagtacgtcaagaaaatcctcttgaacgagttgctagtaatctttcatccaatagtagttttacatttggtgcttttaataatgaaaatcgtttagttggggttgttactttattaacagaagaaaaagacgcatataagcataaaggacatatcgttgcaatgtatgtagatactgaaaatcgaagaagtggtcttgcacgtgatttaatacgtaaagcaattgaaagggcaaaagagatgaagctagagcaattgaatttaggggttgtgtcaacgaacgaaccagccaaacgattatatgaatcaatgggatttaaaacatacggaattgaaaaaagggctataaaaatgaatggtgtgtatagtgatgatgaacatatggtgttgttcttttaagagaggaagttttgtatgaaaaaggcgaaactgcgacaataagatggtgaatatggcatatagcagatcataattggtatcatcaagctcatatcagtcgtttgaggaaattatacagagaatataaactacatattctttaatttttgaatgaacgaacgcccctaaataataattaaaggaggcgtttgtttttattcgttcgcttttcttcccaagctatcattaaatttttatgataatcttttggtttctcaatagaaaaccagtaaattgaatgtgcaatagttggtagccatcttttatagcggatgtgtatattttcatggtgagtatagtgggtcgagattaaagtagattttgacccttgaaaattttgatatgtaatggcctcgatttcataccaatgcactttattcccatgtaaatctactacaattccttcatcatcccaaagtgaaatgtaagtttgtatgtagatttttcatcgcgtatactaaaatatatgtcatagagataaaaaattaaatacaaggggttttacaatgaaagcaattgttatagggatattggcatcatttttctttgcctttacctttgttttaaaccgggcaatggacttagaaggtggaagctggatttggagtgcatcattacggtattattttatggttccaatgctattacttattgttatgtatagagggaacttaaagcaactctttcaatatatgaaaaacaatccgaaagaatggttagtgtggagtatcgttggatttggtctcttttatgcaccgcttagttttgctggagcgttcggaccaggttggcttgttgcatcaacatggcaaattacaatcgttgcagggattttgttaacaccattttttgcggtggatccactacataaaaaacttccgatgaaggaattagttatgtcgggcattattttattcggtgttgttctcatgcaagcagaacatgcttcttcattaggtattcgtgaaaccgttttatgtgtagttcctgtacttattgcagcatttgcgtatcctcttggaaatagaaaaatgatgcaagtttgtaaaggggaattagatgtatttcagcgagtactcggtatgacattagcaagtttaccattttggtttttattatctggttacgaagtatcaacaggcggattaccgtcaagtagccaagtttttcaatgttttattgtagcagttagctctgggttaatcgcgacagtattatttttctttgcaacagatcttgtgaaagatgatccgcaaaaattagcaacagtggaagcgacgcagtctggtgaagttttatttgcgctagtaggagagctgatctggttatctgcaccaattccgtcatcattatcttggattggtatgagtctcgttattattggaatgatacttcatagttatgtggctgtcgttgtaaaaaaagaagaaaaaataacggcgtaatgagattagctctttttattaagagttagtctttttttcatagaaagggatgaaaatatgaatttacatcgcgttgaacaaattgaaaaagattcaatattaaatgtgctacaatatgccgtcggtccaaatgaaataagcttaaagaaagcagtattattttatcaaagtaataaagggactttgtacaaatatgaagaaaaagcttgtctaggtattgaagtaatcggagcaactaaagcacgagtatgtcatatagcagtggctccagattatcgtcaaaaaggaattgcactgcaaatgattaaagaagtggtaaggatatatcaattgacttatatagaagcagagacagacgatgaggcggtagaattttataaaagaattggttttcaagttaaaagtttaggagaaaaatatccagggatagaaagatttcattgttacatggaaaaatagcatgaaaatatacaattgtacatattgaatatagtttgaaaaaaataataatttcattatataatataggtatctggaaaaatatagataaaagaagatgggtgtataacaagtgagaatggataaaagtaagtttataaaaatagctacttcaataggggtgtcatcttttttattaacaggttgtggtgattatgaagaagaaactgctcagcaagaaagtacagctgttaaaacagatggtgcaaaacaaagaaatgaacaagaaacattaaattgtgatgataaagccccaaccaatgaaaatgtagagaaagatgagttatgcaaggaaaataatccgtcattttcatcttatcatgaaaactctcatttaccgatacttccatttgtagcaggatatttattagcgagtagaacttcaaatatgaattatacagcaaaaccaaatttaatgaagaaaccgtatgcaaataatgttattccatatcgtgaaaaagatgagcgtagaacaggtggcggtagtagcggtggttatactggtggttctaacggtaacaataatacttccaataaagtagatttaaataaacagcagccaaatccatccaataaagtaacaccagatacaaatacgccaaaatcatctactacgcaaacaccgaaagtaaactctggttcaagtggaattggaaacgcaaaagcgccagcaggatcctaaaacgaaagggtaatggagtaatgtatacagaacgagagcaagaagagtatatgaaagtatggttttcacttgcagaagaggctagtaggaatggtttcacttggcctagtctgttagagaatgaagaatggaatcaatatatggcaacagggatgtatcgcatgccagcaaaaacttatactgctatctcaaaagcgacagaagaaatcatgtatgtgttatatagaacgtatcaatatattgtaaatacgacagaagattttcaaaaacttggattcccagctgaagcgtgggaaatggcgagaatgaaacataatggtttattttcatattttacaaggtttgattttatcgtaaatggtgacgatataaaattaatagaagtaaattgtgatacgccaacaggctatttagaaccgtctgtcgcaaatgaagtgttatgccgttatcatgatgtaaatcacccaaaccatatagaagagcatattgtgcaggcatgggaacaaattaaacatgactatcatataggccctgaagagacgatatattttactagttatgattggcacgatgaagatagtcaaacggttcagtttttaagaacgtattgcttaaatcagtcaacggactatgtaggaatacaagacattgtcgttgcggaagatggtatatatacgccaagtggagaaaaaataaaatatttatatagactgtatccaatagagtatttagtaacggacgttgataagaacggaaaaaggattggtttacaatttttagatcatattgcgcaagaaagagtgaaaattattaatccgccagccgcgtttgttatgcaaaacaaaagtgtactcgcactaatttggaagctttatgaagaaagtgttttctttacagaagaagagcaagacattatttataaatactttctaccaacatatttttcaaataagcgatttctagaaagacatgaatcatacgtttcaaaacctgtatttggtcgtgaaggtggcggagtatctatatacgaaaatgatgaattattagctgaagataaaacagagtattactttgaacaaaggaagatataccagcaatacatagaaatgcctgactataccattgacacatgggatggtccatatactggtaaactattaattggctctcactgtataagcggaagagcagcaggcttatttttacgtgtaggtgagaaaataacgggaaacttatcaatgtttactggggttacaattgaaggataaagtaaacaaagagctcatcatttgtgatgagctctttcgtctatgtataaaacagctttttatggttggatgtaaaatcttcactttctttttgtgttttaaatctgaatattataattcaaatattttttgtgtaataatattactattttttatagatgtgaaaaatgattaagttaaaaattaagaaaaatatgataatatatttatataaaagtttaaatttacgtagctagtgggggaaccaatatgaaaatgaatgaaatagtagcaagtacacaatttccaaatacaatcgaaacaataacaaaagatttaaaagcattaggagtcgaaaaaggaatgacaattatcgttcattcatcactaagttctatcgggtggatatctggtggtgcggttgctgtagtagaagcattaatgaaagttgttacggaagaaggaacgataataatgccaacgcaatcttcggatttgtccgatccgaaacattggtcaagaccacctgtaccggaagactggtggcaaattatccgagataacgtcccagcatttgattcacgtataaccccaacaaggggaatgggtgaaatagttgaatgttttcgtacatatccgaatgtagtacgtagtaatcatccgttaggaagttttgctgcatggggaaaacatgcagtagaaataacaatgaaccattcgttatcaatgagctttggagaagaatctccattaagaaaaatatatgatttagacgggtacgtattattaattggtgttggatatgattccaatacgtctgttcatttatccgaggtgcgttctggtgcatgtgagttaatacaagtaggagcacctattatagaaaacggtgaaagagtgtggaaagagttttttgaaatggattacgaatctgagaagtttgtagaaattggtgtggagtttgagcgaaaaggaactgtaaaaaatgggaagatagggaatgcaacgtgtcgtctaatgaaacagcgtgatatagttgactttggaacagaatggtttcgtaagaaaaattagtaagggatggttacaatgaaggggaaaaaggtattaattacgagcggtggttgtctagaaaaatgggatcaagtacgcgggcatacgaatatggccaaaggtacaatcggaaggataatcgcagaagaacttctagctaaaggggcacatgttatatatttacacggttattttgcggagaaaccgagtgatgtacatagagggttagaattacatccatttgaaggaatcgttgatttacaagataaaatgaaaagtatcatatcacatgaaaagattgatgcagtcattatggcagcggctggatcagattggattgtggagaaaatttgtgatcaagatggtaatgttcttaatatgaacggaaaaatttcaagtgatatagcaccgattattcactttcaaaaggctccaaaagtattaaaacaaataaaagaatgggacccagaaacagtacttgttggttttaaacttgaaagtgatttaaatgaagaagaactgtttgaaagagcaaaaaatagaatgaaagaagcaagggcgaatgtaatgattgcgaattcaccacattctttatattcgcgcggagctgtgcattatgtaattggacaggatggtaaagggaagttgtgtaatgggaaagatgaaacagcgaaagaaattgtcaaaagcctagagttattatgtaatcgtgtcactgctttttaaaattaagtttttagatgagaatgaatccgcatagtaataagtaagcgaaactttaattggtgggaattttacttttacacgaatgtgaagcgtataccaatcaagagctatacacagaataattggtgaggagtggattctatggaacatttattaaagcaagctattaaacttagaaacgaaaagaaatatgcgcagtctaaagagatgcttataggattaacaaactttacaaaggatgcagaagtactgtatcagtgtgcgtggatacatgatgtaatggggctagaaacagaagcagttccgtattatgagcaggcaatcgcaaatggacttgatggcgaatcgctttgcggtgcttatattggtttaggaagtacatatcgttgtataggggaatatgaaaaggcaattacagtattagaagctggggtgaaaaaattcccagagaacgctccgatgaaagtatttttatcattagcaaaatataacgtaaacgatcacgaatcagcgatgaaattattacttgaaactgtcgtgaaagtagaggaagtaaaagaatttgaacgtgccatttcattttataaagaccatttaaatgaggtttttaaataaaggagtgaacgtatggaggttacactatcacgaaggcgaaaaggtgtttggattggactcgtatctttaattatgctattaaactatttattgtatgcccttccaattgtaccagttgcgccgaaagaagttgtgcttgggtcattattagattgcatgtttgtcattccaatcatcacgtatttcttcattattcgaaaaagatactcgttaacgtatatagttcctgttgtaatagctggttatatttttgcaagatttattattccaagtgactatttacaagctttttcattcatctcttatattattgttgcggctgaaattgcatttgtaggtctagaattattccttctctataaaattgttagagtgcttcctaaaataataaaaaaatataaagaatatagaagagaaaattattccttttcttatgcaattgatgcagcgtttgacgctactatgaaaagaagtaagttagtagatgccattctaacagagtgtaagttaatctattatgcgtttttatcgtggcgtgaaaaagtaccaacaggtaaatctgtatactcatatcataaaaagactggtgctataggtgtgtatatcatgattattcatgcaacaataattgaaagcattggttttcattatttactacatcagtggaatccagtaatagcatggattttacttattttaaatgtatacgcgatgatttattttatagctgaaatacaagcgatgcgcaaaaatccccttgtcgtaacagaagaacaagtagtcattcaaatcggattaggaaagaaaattgttatgccatttacacaaattgataatattgcgttctacaagggtgaattgctaacggcaaaagaaaggaaacaggtattggatgcaactgttatggagttcataaaagaacctgctacttttgaaataacattaaaagagccagtgaaagcgcagttgttatacggcttttctaaaacagtaagtcgtgtttacttaaatgttgatgaagaacgaaaattttatgatgcggttaaggaaaagttaaaacatgagtaatagtgctgttagttacataaaaacaaatgagcttccgttagaagtgaaaaaatatgaaacatggatagtgaaaaactctttctaaataagaaggagtttttattatatacttttataaaacattatataaaaaactatacacttctttatcactacataaatggatataattgaggatagaactagcataaggggaaacaaaataatgaataagttacttacatcgaaaattgaaattatagaaagaaaaatccggtataactcaacaatagtagatcacaattgcttattacttgaaaagcaatcacaaagtatcgttttatttcacgaggtgcagtattcatttacaatgactgcaaatgatactaagttaacaatcccaaaaggaagttatacaatcgcatattactggaaagatcgtccgtacaatttatacgtatggagagatataaaaggaaagtatttaggttcctattttaatattgtaaaaaacacacaaataaaagatgaagtggtttcctttgaagatttaatcatcgatattatggtacttccaaatggagaatacttcatattggatgaagatgaattaccagaaccattagggaatttcgaaggtggttatgtgaggaaagctctttatggattaaaagaaatcattcaaaaagagctgccaccaatagttttggagacagccagggtgcagaggaaataaaatttaattacataaatattttgaatgggaatgagtagtctcaagttatatgatctaacttttttaataaatctaaggttagtagcatatttcttgaaattactcttttttttgtagaaatttcgtcgcttagttattaaattccatcaaatgcatttagcgtgtgagttttcttattggttacagtggattaaaaatcagaaaaaatagtaagtaaatgatatcgttcaaataaacaacagtaaaaatattcaaacgaatcatatgtatgttttgataaaacctagttgacttatcggaaatatttgtataatatgtacttaattccataacgtattgctgattggagaaaccaaaggcattttatctgttgataaaatgcctttggtttttttattgcacaaatactgaatctgttcatttatatgaatcattttaaggaggagaagaaatgactgtttcaattgatggggtatcaaaatattttttgaaacaaactggtactgttcaagtattagagaatattaattttcaattagagaaaggggattttgttacagtaattggtccgagtgggtgcggaaaaagtacattactaaaaattgttgccggtctagataatgattttgaaggggaagttgttattgacggggagcctatcttaaaaacgagcaagaaacaaggttttatttttcaagaacataggctttttccatggttaacagttgaagaaaatatagcggcagatttatcgttaaaagataagtatgtgaaagataaggtaagagaatgggttgaaatcgttcggttagatggctttgaaaaatcgtatccgaaagaaatttcaggcgggatgtcacaacgtgttgcgatagcgagagcgttattaagagatccaaatgtattattacttgatgaaccttttggagcgctggatgcttttactcgaagtcatttacaagaagtattgctaaatatttgggagcagaagaaaacaacaatgatattcgttacacatgatatagacgaagcgatatatctttcaaaccgaatcatcattatgagtgcaaaaccagggaaaatacataaagtgattgaaaataatttggcttatccgcgaaataaaacttctcaatcgttccaacaacttcgaacgaaagtattacagcagtttgaatatggagggttgattcaaacaagtatataggaaaagggtgattttatatgtataaaaaattaaaaattctttcttttgctttagctatatcagtatgtttgttaggatgtgaaaaaagtacagcaagtagtaagaaagaagatgtaacaatacaaattggtatacaacaaggattaagcccgctattactagcaaagaaaaaggggtggtttgaagaggagtttaaaaaagaaggagttaaagtgaaatggacagagttccaaagtggacctccttattttgaagcaatcgcatcaaaccgattagactttggtgaagtagggaattctccagtcatttcagcgcaagcagcaggtattggatttaccgaaatcgccaatacaagttatgcgagaaaaggaactggaattctcgttcaaaaagatagtaagattgcgagtgtaaaagatttaaaaggtaaaaaaattgcagtagcaaaaggaagtagtgcctttaatttattatatcgagcacttgataaagaaggtattgatgcaaaagatgtaaatgtcattcaattacaaccagatgaagcgcagcctgcattcgaatcaggatcagtagatgcatgggcgatttgggaccctttcatatcattacatacgttaaataaaggtgcgaaggtgattgcagacggtgaaacattaaatgtctcttcaccagaatttttaattacgaggacaaaatttgcgaaagaacatccagaattagttgagaaattcctcaaagtttatgagaaagcacgtgtatggcaagatgctaacttagatgaagcaataaaagtatacacttctgtaaaaaagatagatgcgaagatcgtaaaagaagtgtttaatcacgacaaaccaattttagttccggtaactaaggaaataatagcagaacaacaaaagactgcggattttcaatataagctcggttctataaagaaagaaattaagacggaaaaagttgtagataattctttcgtagaaaaagcattgaaagcgaagtgaaaagaggttttgtaaagtggaaaatacgaaagctgttatgaaaccagcgagtataacgattaagaaaaatggcataaagaaggtacgaaagttaaatgtaaaagttttagtaagggcgattactataccggttattatattaataatttggcagttggctggcgtattcggtcttgtttctaaaacagttttaccaacaccattagatatttttctagctttccaagagcttattaaaacaggagagttattcggacatttaagtattagtgtattcagggctgcggctggtttctttattggtgggggcttaggaatcattttaggaacgattgttggattttcaacgagaagtgagcaatatttagacccatctgtgcaaatgttaagaactgtacctcatttagctgttgcgccgctttttgtattatggttcggttttggtgaaacatcaaaagtgttattaattgcagatggtgcattttttcctttatacgtaaacgcatttttaggtattagaggtgtggattcaaagttatttgatgttgcgagagtgttagagtttagtaaaagaaaattaatcacgaaactaattttaccagctgcattgcctaaccttttactaggagcaaggttatcgttaggtgttgcgtgggtgagtttagtagtagcagaacttatggggtctacagaaggtattggctatatgattatggatgcaaggcaattttcaaatacagatatcgtatttgtcggcataattatatttgcatttgttgggaagttttctgactctctagtacgtttactagaagtgaagtttttaagatggcgagataactttaaaggtgagacagggaattaacatataaattattaggggtaatttatatagaatgtgttagtatacgattcaaaataaataaggggtgtgtaaaggtatggaattattatggtttattccggcttatggagatggtcgatatttaggaacgacaaaacgaggaagagcagctgaatatggttattataagcaagttgctgcggcagctgattatttaggatatacgggtgttttacttccaactggtcaaggatgtgaagacccttgggtgttagcttcagctcttgctgctgaaacagaaaaactaaaatttttagtagcagtgagaccaggactaatgtcccctacagttgcagcgaggatggcatctacatttgatagaatttcacatgggaggctgcttattaatgtagtagctggaggagatccagttgaactacaaggagatggattatatcttgatcatgatgaaagatatgaagcagcggatgaatttttaaaagtttggaaatcgacattgcaaggtgaaacgatctctttagaaggaaaacatattaaagttacagatagtaaagttgtattcccaccagttcaaataccatatcctcctatatatttcggaggatcgtcaactgctggaaaagaagtagcagctgaacatagtgatgtatatttaacgtggggagagccgccagagcaagtgaaagagaaaatagaagaagtaagaaaacttgcagaagagaaggggcgtacagtgcgatttggcattagattacacgtaattgtaagagaaacagaagaagaagcatgggaagaggcagaacgtttaattcaatatgtggataatgaaacaattgagcttgctcaaaagacatttgcaagatatgattcggttggtcaaaaacggatgacccatttaaataaaggtacgagagagtcgttagagataagccctaatttatgggctggaatcggacttgtaagaggtggggcaggtactgcacttgtaggcgatccgcatacagtagcagaaaggataaaagaatatgaatcgttaggaattgatacgtttgttttatcaggatatccgcatttagaagaagcgtatgaagtggcagaattgttattcccattattgaaagacgagaagaaagaagaaaataaaattgttggtgaaatgattgctgatgcatatgcattaaaaaaatagtgagaaataaagtttcacttatttattgcttcattttgtttactgcctgttaacacgagataaaaaacccgcaagttattcgcttgcgggttttcatcgtaaattattagaaaatatggtaaaattaaagggtaacttaaggtgcggttggttgttcaattatcacttctccgagtaggaggggggtgataatacgtgagtgaaatagcgttgctactgcagggtggactgtttctcgttgcattgttaacgttcgtcgtcgttttaatagacaagctcaaaaaataacaacccacctatgcctatagaatgtgggttgttttgtttgtaagaaacaaataggataaatgaacaatccaatctgctaagttacgtggactagtgtgtagccgcacactagttttttttatttatatacaatttataattggtttatgtgattgtattgttcttttcatactcattataacacagtgtcttttcatcaagaaaggagaccgtatgttctggtctctgttatatagtaggtgctttttctttaaacagcccatccatatactgttttaaactttggacataaaatttttgtgtattcacattatttacaccgacaatgggtgatggaaggtcaaatcttttttctgataaatgaacgacaacatcaaaaatgtcaaacaaacgaatgaagcaaaacagaccgtctttatcgctaagtaaaataaagtaatgattttcactacttgtatttagcgtattccataaagaacttttgcttaaatcacgtacaatgcttttttcttttagttccacgaaatctgcatttgagagaatggtagagatatcaatcgcatcttgatcttcaaagtagccatcaactgtttgtacagcgaatgtataagccatttttaatatactcattttatatttacggttatccaatagcaattcacgttgaatagaactggctactttcgttacacgttcctctttccaaatttcattatgtaaggaaatatcgtgctttttacatagtttcataattaatgcattagaataaagaatttcgtcgcttacttcgacaacatcagtctcagcagccgcaagttcctcaccgtgctcatttgtatagagtggggaatcaatttgtcttttcatttgttcaatcttaaattgactcaatttatgcctaattaaaggacgatcaatatttgttgtcatttgttcatgacaagtatcacaaattgagtttgtgaaataatatccacataatatttctggaatgacatattgttcactaagttctttcgtatcttttctgcaaatgatgcattgtgtcatttttatcacctttacctgcaaatttgtatataatctcattgtagtgtatttattggtattttggaatattgtaaaggaaaatattatgtgaaattcatacttattttggtacaatgaagagaagtgctagtttaaaggaggccatttttttgaaatcaaaagtgcacttttggacattagaagtgctaatggttgtaggaatcatatttatttgcacaaaaatatcatttttatttcaaccgattggtatcttcatatcaacattatttttcccaatcttaatcgcgctttttttatacttcatatttaatcctgtattaatctttttggagaataaaaaagtacctagaaatttagcgatattgctgttatatctttttatcataacattaactgcggttggcgttggagtagttgttcctacgatttcacaacagctaatggacttagtaaaaaatatgccaggctacataaaagagggaaaagtatacatacaagaattatcacatcataggttgtttgaatggttatctacacaaaactacgtttccattgaaacaattgaaaaaaatgcgattgaatacttaaaagatataccaaatacaattacgtcgagtgcaacggctttatttggtattatcacgaacgttgcattagttgtatttactgtaccgttcattttattttacatgtttaaagatggacatgcctttccaggaaaagcggtaagtttattaccagagtcttaccgtgaagaggggcttcgtatcattaaggaaacgaacgaaacattatctgcatatattcaagggcaagcgctcgtttgtatatttgtaggtgcgtttacttttatcggttatttaattatcgatttaccgtacgctttcgttttaggaattattgcagcatttacaaacattattcctaacttaggtccatttatcggagcagcaccagctgttattgtaggactgttcgtatctccgatgcaagccttatacgtaattattatcgtaacaattgtacaacagtttgaaagtaatattatttcaccacgtattatgagctcgaaattaaacatccacccattaacaattattatcctaattttaggggtaggtaactttgctggaatcatcggaatgattttagcagtaccagtttatgcagtaacaaaaacagttgtttcaaacttagtgagattgtttaaaacgaagagaagtaatcggaaatagtaaaacctgagaaagatacacctctatttaagtggtgtatcttttgtttataaaaaaataattaaaagcgggttgatatgattttattatatattttttatacatcaaattcagcgatgaacttgtgtgatataagctctataaaactatgtggaatccctctgaactatccaaatcatttccttacgtgctatcatcatcataatcgactcctttcaattctatatagttaaacgattaaaggtgagtgtagtatttgcttctacgatctcgaatttcatcaataacttgtttatattgtctttcttgttttaattcattttgagatattgtttctttttgaatcgtaatcgttaaaaagaataggtgaaacttcatatgtgaattcctcctttcgaattggaattacagatgactacagtaatgactttgtctttcttttacagaatccatagcctgattaatttgtcgttcatgaagcatttcagactcagaaaatttatttttttgaatggtaatggttaaaaagaatactttaaatttcataaaataattgcccctttataagtgatttagaaaaaacgagtgtaataagaaattacaggtgactacagtaatgactttgtctttcttttacagaatccatagcctgattaatttgtcgctcatgaagcatttcagactcggaaaatttatttttttgaatggtaatggttaaaaagaatactttaaatttcataaaataattacccctttataagtgatttagaaaagacgagtgtaataagaagattgaagctcttttacttcgtccataatattttgaatgtgttgttcacgtaaaatctctttctgtgagagcttacgtttttgaatagtgattgttaaaaagaatgctttaaatttcatgaatatattacccctttaaaatatatttttaatacatttgagtgtagtatgaacttttaatgtcagttattttatcagtcagttgttttaactgttgtttacgattgatttcagtttcagataaagtatttttttgaagtacagtcgtaaaaaagaaaatatgaaaagtcataaatgaattcctcctttcgaaaaggaattacaggtgatcacagtaaagtgcttggcgctccttaacatcattcatagctttttcaatttgctcattatgaagaatttcatctttggaaattatatttctttgaatcgtaatacttaaaaacaatacgctaatagtcattgaatgttgctcctttcttagaaaaataatgtaagagactaaaaaatcgcgcaaaaaaaccacaggaagatacagttctcctatggctgggcgtgaaaaagccacaggaaagtatacggcctcctgtggcgaatttatgaattaaatgaaataaagtacgattttcaattctccattagggtggtcgaattcatatttaattgtccagaaaacacaggtgcagttaacgctaaagttaatgcatgtaattgtaatttcatcatttccttcgacctccttttagaatttttttcttacgttagtaagtatatacaattaatggataattgtaaacataaaaaatgaaaatttttaattttgattaaaatgcgtatatttaaaagggatttgaaagtaaatattgtaattaacgaaatatcgataaaaatgggggatgctaaatgaaatatatgcatcataacatgatcgttatgctaacaatttttttattcattgcggcttgttctaatggagaaagaataaaagatatatatgatattaggtcagatgattttaagaaatatactgggacatacgttggtaataattcagatgtggttgcaattgttaatcatttacccggtggtggaacagttcaaagtataagtttagaaaatgaaaatataaaagtgaactatggcgcaaaagaaagtggggctcttacagaagaaatgattgagacgtattggtttgatgagaaggatacgatgaagaagaattttttctttaatgctatatatttagtgattttagtgccaaatgcaaaaagttatgagtttcaggtagagaataaaaactttaagataacgagggaagaaatgttatcaattttgcatagaatattcgatgattttccaaaagaaaaagatatatgggataaaaataaagttataaagttctttaacggcaatgaagaaaaaattaaaatgcttgtggaagataaagattttcggaaatctttatttgctaaatatccagtgagccagttgaaataatggaggggagaagatggagttagtatacaaaatttcttatcatagaatgcaggatcattatttacctaagttagtacaggcaattaggctcgttagtgaagaagatttgtggaaacaagagaccgctgttaattcaattggtggaatcgtactacatatttgtgaacatttacagagaaatacaaggcgttataaggattccaatatagtttttgaaaatggaattgaagaatattttccaataaaacatttaagctccgaaactttgttaaaaactgttgaagaaatatttgatgagtggggaaaagtatatatacaagtatgggaagaaaaaaggcatattgatcttcatagtttattacatttagtggagcatacaagttatcatttagggcaaatagtagatcgtacaaagtcaataaagggacaacaatttaacttttgtcaaaatggtataaatgaaaagaatttgagaacaagagttgaaacttcgaaattttagaaagagagtcattcttaaacgaatgattctcttttttgtaaaagaaatttatggaaaaaaacatttttatgtgatatggttaattacataagtaatgaacctatgaacctaaggtggtgaaagtgtgaaacctactctggagcaaaataaattaatatacttacaaattgcagaaacgattgaatctgatattttaaaagacatattgcttgaagaagaacaagttccatcgacaaatcaatttgcgaagatgttacaaataaatccggctactgcagctaaaggggtgaatgtattagtagatgaggggattttatataaaaagagagggatcggaatgtttgttgcaaagggagcgaaagaagtcgtactaaaaaaaagacaaaatacttttatgactgaatatttacctaaagtgtgggaagaagcgaaagtactagaaatatcaaaaaatgaattgatggatatgattcaaaagattacgaaggaggggaaagagggatgattgcacttgaaacgaaagatgtaacgaaaaaatataaaaagaaaatagctgtaaatgaagtaacgatctcattggaagagcataaaatatatggtttgcttggaaggaacggagcagggaaaacgacactattaaatttacttgcaggtcaaattacttcaagtagtggaagcatatcaatatttggtgaacatgtttttgagaatagtaaagcgatgcaaaatatttgttttgttaaagtgaaagaagctgcatatctaaataataaagttaaagagatttttaatttatgtaacatgttttataaaaactgggatcaaaagtttgctgaagaacttgctaggaaatttcaacttaatttgaaagaaaaatatcataaattatcacacggaatgcaaactgttgtcggaatcattcaaggattagcaagtagagcacctattactatttttgatgaaccaactacaggtttagacgcagcacaccgtgaattattttatagtctactactagaagattacggtgagcatccacgaacaattatattatcaacacatttagtagaagaagtaactcatgttattgaagatgtaatcatcataaaagaaggtgcacttgttgttcaatcatcagtggaagatttattacgacaaggtcatattatttcaggaaaaaaagataaagtggatgagttttcaatcaataaaaaagtaataaatcgagaagtttatggaaataagaggatttctgttatatgggaagaactttctaatgaagattattactctcttgaaaaagaagggttatcaattgatagaattacattacaaaaactatttattcatataactgggggtgaaataaaatgacgatgttaatgaagcagttgaagttacatataaaatatcagtataaagccattcttatcttttggactgtggcattacttataaaagggacaatgactgcaactgatttaaagggaataaaggtagcatttttacatgatattttcaataattcatcaattgtaatcgtaatgtttattgtgataagcgtgtttcttattcaacttgatatttttcctacagtcgtctcgtttggtgtcactaggttgcaatttttgattggttcaatatgttttaatttattgcaatcagcattgttttcatgtcttcaagctttgtttttacaggatacattttataaaacagaacatgtaaatttaggagcatctgcaattgaacaattctttgtacaattcatattttatagtacattagcttgtttattccaatcaacaactattgttcagaaaagatttaattggttcggattggcctttagtataatagttttattcggattggcgagtacaatgtatgcagggataggtataaaagagttggtgtttattaatagtaaaatgttactagaaatacctaatttcatattagtttcaatagttcttatttgcatatatattgtaattagcgctctatttattcgtaaggtttcgtttgaagatacaatttaaatacaattattttaggggagaaggaagagtgaatgggagatacttcttcattaataaccgtttttttatgcattgcactactaatattttggcgtcgttatcgctccatgtataagccaataaagggatcgggaaaacgtattttatggccattactatttttaacaccaggtattgtatggtttttaggtcccgtacatccagctgtactacaagtggctatagcagcatttattgggattcttttctctgtaccacttatagcactaacaaattatgagcgaagagatgatgggaatatttatacgaaaaaaagtgcagcttttttaattacttttattgcacttgtcgttttaagatatggttcaagacaatttatcgttgatttagatcaacaaacgattggtttattattttacgttgttgctgtctcgtatattattccatggagaattgcttgttatataaagtttaggaaagtttggcgggaaaataataatcatgctatatgaaaacttctcatttgagaagtttttttatttttataggtaagcaaaacaagttgttgaagggcaggctgtcatagaatatgatacatattataatgaggaaaagttgaggggataaaaatgcgtacaattttactttttctaaacaacatgtccatcgataaaatagagaacattagacataaacatgatcctttatttggattaattccaccgcatataacaatcgtattcccgtttaagagtaatatttcaaatgatgaattaaaatctcatatttttaatgtatcaaaagggggaggcaaaattgaaattgagtttgcaaatcgtatcattagcgtaggaaactatttgtttttagaagttgatagaggaagaaaacaaatagaagaactacatgataggctgtatacaggacctttattacaatttttgaaagaagacattccgtacatcccgcatgtaacagtcggaagaaaagaaagtgccaaattagctgctgaagtagtgaaggagattcctagttttcatgggaagttaaattgtgtgattgatagaataagcgtggagcgaattggagagaacggggaatcaattattgaatttgaagtgccatttttaaaaagctgacaaaagtcagctttttatttcgtagcatgaagtaatgcaccaattgcaccgctattaccaccatcttgtaaaaagattggtgttttattttgatattcggtgtagctacttataatatgttgaagttgtacgttattacataaagtcgaaccaatataaataatatgtttaatgttttttgtttcagcgaattgaaggcttaatgcagtaacgacttcaccgacaagtccttgtatagtagcaagtatgtctgagctattatatttcgattctgaaatagcggctttaccaaaattgctagcagttaagttattatcgataggggaaagaataccactataaatatctccaaccgtaatatctagttcttttctagatcctacttttgttagagggattacatcttcaaaatgatttgtatttgttaacaattttgaaagtcccataatagtcccaccgccaactccggttccaccagcgcgaatatattgttcattataaacataatggatagaagtacctgtaccgatattggttaaaataaaattgtttatagtgtgtttttcttcttttaatatgtattggacacctgcaagagtagattcaaattcgtttagctctattattttatatgaacctgtaagcagatgctgtaatagtttcgatttaccacccgtaatacatatttgttttatgccattgttgtttttaatccaatctattattttatgttgttcatgtgaataaaatttttcaaaagttaatagctttttttcgttaaaataagctattttcgttaatgtgcctccagcatcgataccgatagtacgttccattttcctgctcctaactacgtaatatgttttcctatttacttaattggttgagaatagatatttccaactgatataaggaacactttaatctgcttgatatattaatagtttttctatagttacaataggctggtcgtttacagttgcaatacctttaccaagaataaaacctcggcgattgcgcgttagctcataatgtaaatcaagtttatcaccgggatatgcttttccgtggaattcaactccatctaaagaggagagaaatcctagtccttcagaatcacttgtatgtacaaatgcactaagctgggcaagtgattctacaattaacatatgaggcatatgtttttgactatcatttataaaccattcgttatttgtaatgagtttatatcctgtaacggattcaccttgttttacatttgttactttatcaatcattaaaaatggataacgatggggaagcgtgtctttaatatgcatatgaaagtacctccaattaataatacccctgctaaagttaagcaggggagtgggaactaatttttaactaattcatctactttttcaaggacgaaaatgccgctatttctaatattttcaacaacttgttgcaatacttctttattttgaacgagtgcaatacgtacgaagccttctccatgaggtccaaatgcatgaccaggtgtaacaacgacattcgcacgatccattaatgcataagcgaagtctagagaagtccatccttgtggaatttcagcccagacaaacatactaccagctggcttatcgacattccagccaaatgctcggaatccatcgactaaagtatctctccgttcttgataaatatcgcggtttttctcacaaaatgcagcgccatttcttagtgctacagatgccgctttttgaattggtaaaaatacaccgtaatcggtattagatttaaattgagtaagtgcacgaacaatttcttcgtttccaatcatatatccaatacggctacctgctaaactataactttttgacaaagaattgatttctacaccaacttctttagcaccaggtacagagagaaagctaattggcttattaccatcgaaataaaattcagcataagcaaaatcatggacaacgataatattatgctttttcgcgaatgcgattacttctttaaagaaatcttcatgagccattgctggaacgggattccctgggaagtttaaaatcatcatctttgcttgatcggcaatttcttcagggatgacttctaagtctggtaagaaatcattctctttctttaaaggcatgtagtaagatgttgcaccagccatttgaatacctgtttcataagctgtatatcctggatcaggaactaatataatatcacctggatttgcataaaccataggtaaatgaacgagcccgtcttgtgaacccattaacaataaaacttctttatccgcatttaataaaacgttatgagtgttgttgtaatattcagttacagcttcgtgaaattcttgaatacctgataatgtatacccgtagctctctttctcactcgctgtatgtaccattgtttctcttacaaaatcagcgggcggcatatcaggatttccgatgctcaaatcaatcatgttatgacctgctgcaattttttcttttttataggctcctaattcactaaatatagaagattggaatgctttcattctagttgctaacgtgtaagtcatcaaaacccctcctaaaacagtgctttcattcttcatttttaattattctgaaaacacatgtttatattttatcatttttttatgaaaattaaaacgattgacaaatttagaggaaggattagcctattttgaaaagtaacgatgtaaatagcgtagatgtgttaattgaaatgtctattataggattcattttatataacttaagatattttctagtttttattaagtatatttctcatgttttgaatgaaaaagaatacgaaaacaagggctatttttgtggacgatttctaaagtgaaataacgcagaaaatattttctgcgtctcctctgaaatgtaatcatttctttttatatgtgcataatttttcggctgtcaaaaagtatacatttaatgtaccgtcggcaacttttaaagtttggtccgatgtaaatgaattaccataatcaatgtgatatatattagaatttttgacaaatgagcctttatataaatcgtctttattctttgttgtttgcatttctactaaattttgcacaatttcctctttattttcttttttgataactgtttcaaatttataatatacagggcattccccttttttattgtcaacgacttcccaagaaccgtatatatcgttattgctgcatccactaagtaggatgattagtataggaattgtaagtagaacctttttcattttgtgctcctttcttttaaattttaataaacgtgcgaatacgatagggatattataataaataaagtttaaatttttttaaagaattatttaatttcatataaaaatttaggagaaattaaataagcatgaatctagtgtaaagtcagattcatgctagtactatagcctatgttatgtcttttttgaggataaataaagaggaaagcagaatcactattccatttaatatatatacgcttgcggtcataaaggctaacgtacctgcgccaaatcctgctttatcgaatatagaagcaaatgttgcgatagtcaaaaagataatgggagtcagtagtaaaaatatgaaacctgccacgattctttttttaaaactatgtccagataaggaaatggctaaaaagtttaggatgctaaacagagcaattgcaaagagcaggacaataaatacttcgatgccatcagacattttaccactccttttataaagagtactttttataatctattcgaaataaaagggggatactcctttaggtaatttcaataaacgtaataaataggcgtattataaaacaaagaagtatggattcaatattagacccatacttctttgtttattttataaatttgcagattgcgaatgctgtttttcataatgtttctgcttagaaagggaaatagaaataatcaataatgaaacgactccaaagatgagaaccatatattgtaacccaattgtatctaagaagaaacctgtgccaagtaagacgatttggaacataaccctctcaaacatattacggaatgagaagaggcgaccgtgataacttttttccactttcgtttggaaaatcgtcgacataatagggaagaagcagccaacactaaacccaaacaaaccaaatgatgtaagagccatccattttatatcgctaaagaacaatgacagatgtgcaaaagcagtacaaactgcgaagaaatatagtaatttttcaggtttgaaatgatcagatagacgtttaattacgaaggcacctaacataaatgcgacaccttcaattgtatatatgaaccctttaatcgtaggatcatgttgcatttcgctaatgttaataaccattaaattaaacccagctataaataatagagggatgatacttaatataagtgctgtaaaagcaataggaattccttttaaaatacgaaatacttccataaagctattatcttttgcagcttgtttacttggtgttgttgattttttgtcttcgaattgtaggaagaaagtcgagaggaataataaggcgtatgctgccattgagaaggcatacatgtactgtaaactcatcacaactaaaagaattccacctagtgaagtgcctgcaatacgagcaattgtaccaacattcatatgtacaccgttcatttgtaataactcatgctcacgtacgatgagtggaattacagattgtaatgcagggaaataaaatgctgctgaaatttgaagagcaaccataaatgcgatcataaatgcgatactttcaaattgaatagcaaaaaacatgaaaataacacttaaaactcgaccaaacccagcgtaaagaagaacttttttcttttcatactgatcgatgacacggccagccataggtccaactagaacaccggctaatagtccgataaataatataactgatttcatgaaatcagaagggacatatttttgcataaattcaaggttgccaagaataccaagccataatcctagacctgcaataaactccccaattagaacaatccaaacgtttttattacgccacataacataaaacctctccgtcttttaaaatgaaaaactcgtatataaaacctccttatttatgcattattttcatacgaacttttttagagtcagagtctatattacgtgtttcataattggatttcaatctttttgatttgtcaaaaatttgatgtgttaattgatgtaataagtgaatcaaaacgtaaaaaatttatgattaaagctaatagaaagtaaggatacatataaaaaagcaagaacgtataactacgcctcgcttttctcaagtacaaaattaaatattagattcacttagcaacatttacgctcttgtccaatagctaaagcgctaaaagatagtgggccaacaacttctgcacttgcaccactagtaaggttttctacggttaatgaatattcgtgtgttccactgctaacgttttgatctatagcttgaaatgtttgtacgtagaattgttcagaacctgttgattcaatacctacttgtgtattgaaaagttcaatattatcacgaaaaattcgaaataaaacttgggaaatctcagttataccttctacaccaactgtagcgattaattctactcgattatttcgtgaatctctacttgaaattctcaattttaaatttgctaaaattgctttatttggagaagctgggattgcaaaagttgtttcaccagttttacttataggctgagtagcttggtaatcaatgatatgagtcatattcttcacctcctcatatactagaatatgaaaatagtgaagaattagcttggacaaatactggattatttaatagagtcaacaataattattgaaaagaagaaattcacataaaagcattaagaatatatcacaataagatgatatttttcttaatgctttttgtaattaagcagaatattcttctttacgtacttcaaaaaattcattacgtcgtaagtaattataaattttctctgaaacctcttcttcttcagacactaagaaacgatgatcaaaagcgtagaaagattgacctttaattaattttacgtaatacatattaaatgcctcctgacactaaattattacttgcttcatattatgatggcctatatgtctgctaaaaatacttggagtttcaaaggggataagtaaagggataaaagagcttacaattctgtaaggtttatgtcacctttttcgatagtttgtatttaccaatttcttctataatgcaaataggttacataaaataagggggtaaaaagatggatgaaatacttggagaagttgtagctggtatttgtgaatttgtagtggaagtaacagcggatgctataggaaatttagtttctggaaatgatgaggaaaaagaaacattataataatttgtaaaagaataaagttgatcaaattataaaggctgatttctaaagggaaatcagcttttttattttttacattatattaacttaatttgaatattcatttgttatcatatttaagaagcctatataaggaggtgaataaacaaatatgtcgaattcagggcctgatttatctgtttctcgtttgattgtggtaaatatagaagaaaaagaatatcattttattgttcgtgaacatccgattgtagggaaatttatatcgctatttgaaaatgggaaagaatacggtttaatagataaacaaatcgctaataaagataaatttattacatcggagcttactaagttagattattttaatatagatgttttatatcttacacctgggtggatatggattggtatggatcaatttggtttacatgctcgtgaggctacttataacgaagtagatgttattatgaagttgaaagaggatttatattatatagatatatacgaagaaataaaaatgtagtaaatatttattcaggttaggggggaagttcccatagccttttttttgtttaataataaaatgcaaaattatattattttaatgaaaggtaaatatgataagaagtgagatgaaaagaggatttgaaaatacattaagagaattgtaataattatatgagtcgtatatgtaaataacaatagaaagaagatgataatatgagtaaagaagagcttgtgaaaaaacagtttggcagcaatgcagataaatatataaatagtaaaatacatgctaaaggactggatttacaatatgtagttcaacaagttgagtctcgtcataataatcgtcttcttgatgttgctactggtggcgggcatgtggcaaatatgttagcacctatgtttgaagaagtagttgcacttgatttaacagaacagatgttagaaaaagcaaaagtttttataaagcagaatggtcatgaaaatgtatcttttgtagcaggaaatgcagagaatttaccatttgcagaccatttttttgatacaattacatgccggattgcagcccatcattttacgagtccggctcaatttatttatgaagtaaatcgtacgttggagaataatggattattcatcttaatagataatgtttcgccagaaaataatgaatatgatacattttataattttatagaaaaaaagcgtgacccaagtcatgaacgagctctaaaaaagacagaatggcttactttattagaaaaaaacggtttgcaaatgcagtcatgtcttacttttgataagaagtttgattttgactggtggtgtaatatgatggatgtccctttacaaaagcgtgaaaaattaacagaatgtatgatgaaagcaccaaacgaaatgaagggatattttaatattcaatttaaaaataataaagtagaatcgttctatactgaaatggctatgtttatatgtaaaaaaagtacaacgttaaaaagataaagataaatgtgttgcagtctttctgaagtacgatatacttagtacagagaaactgagaattgaggaatagttataatgattcgtgtacgcattgaaggtactgaggaagaaatgcttgaatttatggggaaaatgccagacattcctggatttgaaaagacacatatgagagagccgagaaaaggaaataacccgaaatacgattcaagtaaaaatgtacttgcatatttgtcttataaaaagattgaagtcgccaataaataggcggctcttttagtttgcgctgtttcaccgccttgtctttttcacataataataatagtagattatgctcaagaggggtgagaatagttaataagaaaattatcttttttggagactttggtattgatgacgccgtagcgttaatttatgcaaataaaacatgtaaattagatattttaggtattgttgctgagtatgggaatgtatcacgagatatcgttacggaaaatgtttattttttagaaaggtattatgctacacaagtgaaaattattgaaggtgcgagtagaccgatgacagctgaagagcctttgtttttccctgaaatccacggggatcacggtttaggtcctattattccacctgagatgagaatttgtaaacgagaaaatttttgtgaattaatcaaattaatcgaaccttgtccagaagatattataattgtggcgacagggagactaacgacgcttgctacgttatttttattgtatccaaatataatggatcgtatttgttcgtattatataatgggcggcgctttcctatttccaggtaatgttacaccagtatctgaagcgaatttttatggtgatccaattgcagtaaatattgttatgaaatatgcgaaaaacgctagcatatacccgttaaatgtaacacagggcgcgcttataacacctgaaatggccaatataatagataaacaaggaactggacaggcgaaactcattaaaccaatgattgatttttattatgagaacttttataaaaaagaatatccgggtattggtgggagtcctatacacgatttattaccgtttatctcgtttataaatgacagtattttcgaatataaaaaatcggcagtgtggattagtacgacaaatgatgtgactaggggccaaagtgtagcagactttagaaaaatagctgagccaacaaggtttgatgatcggccgattcaaagaattgctgttggttttaactatgcagcttttaaagaagagtttatgcgaacaatattgaagccagattgtccttaatgtgtgtaataacaagtcggataaatcgttagttcaaaaaaaggtttaatctgtgtgtattattctcaaaaatcttaaagttgaacaacatgaataacttatgaaaaatgtcacataactaatggtaagcaattgtttctaattatattttgattggtgaaatgtaaaggaggttattatatgatttggtctttaatcgtcggtggtatattagggtggcttgcgagcttaattactggaaaggacgtacctggtggtgtaataggtaatattattgctggtattatcggttcttgggttggttcgaaattacttggtagttttggtccagtcattggcggatatgcaattattccagctttaatcggtgcgatcattttaattttcatcgtaagcttcttattacgagcaatgcgaaaatgaatgtaaggactgtttacatttgtaagcagtcctttttatatgttatgctagtattatacaatcaggaggtgtcagcattgaaaacattcacagtaaatttccatcaagaagataatgctaaagcgacaacagtacataaattaagtgaagaggactttaacaaagcaacagaaaaaggcactcgtcatctatttgatttagatacaaacgttggattcttcgtattctttgacgcagaagatgcagaaggaaacgatcaatacttaatgttacaatacgaaggtgatcatgaagagccaactgcgtgctacggatttgatttaaaactatactatcaatttttagcactgtacttaaacgatcttgagttccaaggtgaaacagatgaggaagaggaagaatacggtccaattcatcatttagcgcatttactttatcatattgttgaagatggtaaatcaatcgaagtgtaatatacatatttgaagctgccctttttgggcagcttttttatatgacattggaatggtgtactgtgagctaaataaagtgaaactttaatcagtggggggtgttcatccccactgattatcagccctcaccaatcgggcttttacggacagtagggcccccacctaacttctttgtttccgctgaattttgaggtggggatcttactgcccggcaaatagcgggataaattaataatagaaatttatttattactttcatgttagcatcgtaaaacacctgttataatgattgtaattaaattcatggaggctaattctatgcttgtagatgtaaaagcttttattaaagctgcaggtttaacatgtatttcattattaagtggagataacacgtttgcttataattttgaaactgtaaaaaatactatcgctacattttttaagaagctaagatttaccgtataattttatttcaatcagtaggaaaagagtaatcacttcctactgttttttttctgtttcaaggagctgttgtgagagcatgttttaagttatagatagaggatattatcattgagaagagaaggtttaaataaggagatgaaaatggtttcgtttatcaagaggtagttacttcggatataacagacttggttactttttagaaacagcttttgtaatatgttttgtacaagcttttggagagagtgaagcactgactttttggaacaaacataatttgaaaagtaatgtaatgggttggttaacgaaatgaataagatgcaatagggggtaaaaatgatgaaaatatatttaaaaatagttatgttatttttggtgtttacatgtatgtttgcgctagtcgcatgtaaagggacagacgaaaaaaaggaaacaaatccaacctcggaaaataataaaaatgaacaaagtaatttttcagaagaacagaaaaatcctgaagcaaaaccaagcaatgaaaaaacaacaaaaccatcgcctgacccagattcgaaaaatagaacacttaatcaaaaatcaattaaccacgttaaagatttgtttgaactcgcaaaagaaggaaaagtacctaatgtaccatttggagcccatacaggggatattgaagaaattgaaaaagcgtgggggaaagcaaataaaaccgaatatgcagggaacggaatgtacgcaacttttacaaataaaaatattgttttcggatttaataaagggtcacaagtttttgatgtacgctcatatcatgcagaactaaaattgattacattacaagaaattgaaaaagcattaggaaaaccatcttcagttaaagagaatggtgaagataaaatatatgtatacaaagtaaataaccagtatgagctgaaatttgtcattccaaaatcgactggtaaggtagatcatatttctgtattttcaccagaggatagtattaataaaatggcaggataagaaattaagtgatttcaaaaacacctcactttccttaagtgaggtgtttttagttgtaaataaggaacgtctcctgccatataaaacatactttcatacgcgaaatacttcacttttgttttttaatattcatccaataagaaatattgatctactgaaaaagtagtaacctataaattatgtgtaggctggttcatgatttttttacgttctaaattttgaacaaacagtgcttgaacaatacctccaattaataagaaactagcacaaatataaaacagcatacttccatttaacttacttaataaaactgcacccataactggtccgcacgttcgagatatatcccagtgtataccgtaaattgaaaaatataaaccacgtttattgtgaggtgcaatttctgaaacgaatcgtaataagtggtttagagcaatactttctccaatgactaaaaagagtaaggtgaagaataacgacaatatcgtcgttgaagaactaaagccaactgcagctattgtatagcaggcgtaagaaataaggatgattttcgccatagaaaatcgttcagaccattttacgaggaagatttgtagtatgatttccaaaatggctttgcatgttgaaataaatgcgagtatgaataagagattaggaaatacatgttctgcaaaaatacgataattcgtctcagtttgtgcataaaaaaagctaataggaagtgtagaaaccataagaccgaatatggcataatgtttaaaaataaattgctttggtgaacttgcctcaactgtttgtttcgacttactcataggtggaacggtttctgggagctgggtccaaacaacaacggcatatatcgtaagggttacactttgcacgataaataaatattctgggtgagtattataaaaacatgcaccgattaaagggccgattacggatccaattgctcccatcgtttgtaggagagcaaaaatttctgcttgctgctcttgttttgttaaatcagcaatttgtgcacgctgagctggaatgtataaggaacggccaataccattaatgacatataacagtgcaaatataaaaacagattgagcgaaaacgaaactgccgattgcaacaccttgtagtaataatccgagtaacataatcttttttcggccatatttatcagtaattcctccagcaataagtgtaaataaaatgtctgaaagtggctgtaatccgaaaattagcatagttattattacattgccgtttaacattttattgacgtaaataatcataatgagagctaacatagattcagtcgttcgggttaataattcaccacacaatctaataaaaataggtttattgtaacgaagtaagagataattcaatattaattcctcctttctatattgaaatgataagatgaaaggagagttggaaaaagggtagagactatagggaggatttttcaccttttagggggagtatgatgtttattttagatcaatacattgaactatggattgcttatggaaaaggaaaaaaagagggagaacgattggaagtaacagtgcaaaatatatctggtacattattttgtacagagcgcaatagtaaattaattataaaaaaattagatgagttaaattggatcaagtggtttccaggtcgcggcagaggaaatcggtctaagttaatatttcaaaagcacccgatgtctttaattttagatagaggaaaagaaataatgaaaaaaggggatgtgaaaagcggaagtatatttgtggaacgctatagctcacattttccatcagtaaagggagaatatcattcctgggtggattcaatatttggtcataaggttgaaatgacatctgaagggagaagagatgtactccggttgcaagtacaaatgaatttagatatcacattagatcctgtatacgctacaatgcgctcagaatgccatatggtaaaacatatattcgacacactcgtgtatgtagacggtaatacaaacattatagagccaagacttgcatttcactgggaatataatgacgctgaaaaaatatggacgttttacttacgaaaaggagttcactttcataatggaaaacaacttactgcacatgatgttatatactcgttgaatagatttataaagctggaaaataatgcacacgcatggatgttacaacacgttgaaagtatccgttcagtggatgactacgttttcgaaattcaattacatacagaaaatcgaatgtttttacatatgctaagtgcagaacagtgttctatcgtgaatgaagatgaagcaggagggctaattggaaccgggccttttcaattatataaaagtaatgaaaatctgttcattttagaaggacatcctttatattttcgtgaaagaccttttttagatcgtgttgagttgtggaatgtagaacaaggtgtaggtacatacgatgttttagtaaaggcgcagtataaagataaagaaaaacataataaagaattgtctcggcttgagtcgaacgtgacatatataacatgtaatcttacgaaagaaggaccaatgcaagatgagttatttcggaaagcgttatataacatcattcatggttatacaatcgttcaagaactcggcagagaacgtggagaagtggcaaaaaaactaatattagcaggtgaaagcattgtagagattgaggaagatgtagaaagtttaattaaaaggagtacttatcataatgaagtgctacaactctacacatttacaggacgagatcatgttgaagatgcacagtggatacaaaaagagtgtgcgaaatatgggattcgtgtagaaaataattttcttgatatagaagagctattggaagtaagtacgatacaaaaggccgatatgatgcatgatagtgccacaatcagtgaacgaatagaagatagtctattatatatgtttcttacaaaaaatagttttattcatggacaaagcagcatggactttcatgaaaagttgtctccttattttagacaagaagaattagagaaaagagttgcactgttacgcgatatcgaggatactttgttacgtcaaattcatattattcctttatatcgtaataaacaagaggtaagtacacatgaaaaagttcaaaatataatgattaattcacaaggttggattgatttttataatatttggtttaagtcttgatatataagggcttttgcacattttcataaggtgtgtaagagccttttttgtatgtaggaataggtttgttttacacattgttacgctacttgtgataaaagtctatttacagcgtaacagtgttatgttacattgttatcaggaaggagtgttatagagttgagtacagatttaatttcaaaaaaagatttattagaactaactggtatttcatacggacagttatataggtggaaaagaaaaaatttaattccggaagattggtttgtacgaaaatcaacgtttacaggtcaagagacattttttccgaaagaaaagatattagagcgtatcgataaaatccaaacgatgaaagaggatttatcacttgatgaactagcgaacatgttttcgccgagtgtgagagaaattcttttaacaaaggaagacattttatgcaaggggattgcatcagaaccagttttacaatttttcatagaacaaacgaataaaagagcagagtttcaatttgtagatattctttatgtgtacatgttagaagaattactgcaatcaggagagattagtttagaagaaggaaaaatggtcttgcaagttttacgtgaaaattatgaagcaattaaacataaaacttgtgacttaattattgtccgaaagttagggatttctacatgtttattagtctcaaacgtggacgatttaatttttgaaaaaggcaccaaaatcgttttacgcgaagcgattatgaaatataccgaagcattaaaaactaaattgttgtagtggaggagaaagtatgcgtacagataatttgattataaatggttacggttcatcgaatggtggcgagtttcataaagtgcaattaaacggaaaaggaactgtgaatggaaatgttgaatgtgagcaatttgaatgtaacggttacggtgcagttactggcgatttgaaaagtagcagtgcacgaattagcggatctggtaaagttgatggcacagttcaagctgaaacgatgcgaattgatggaaaagcaacaattacgcaaaatgtaaaagcaaacagtttgaaaattgcaggaaaaggtacgataggtggaaatgtcactggtgaagaatttaaagtcaatggtcaagctacaattgacggtaattgtgaagtggatactttttcttcagaaggacaatttacaatcggtggtttattaagcgcagatgaaattaatataaatattcacggtacatgtcgagcgaaagaaattggtggtcaaacgattaaagtaagacatagatcaggtacatttagtagactatttaaaacagtgtttggcttgcagttagaagctgaactattagaaggtgacaatatcgatattgattatgctcacataagaacggtaagaggaaacaatgttacagtaggagcaaactgtgagattgaactgattgaatataccggtgttcttactgttgataaaaatgcaaatgtaaaagaaattaagcaggtttaacggaagggagaaatcagtatggaacatccacatagtctcacagtaaatggttctggtaattcagcaggcggagattataataaagtgaagattcgcggtgaaggaacaattacgaatgatatgagttgcaatgagtttaaaacgtacggaacgagtgatgtacgcggtaatgtgaaagtgaaaaactatgtcgtgtatggagataacgaagtacaaggaaatgtagatgcggaatatgtaaaagtatatggtaatacacaaattcatggtgatgctcatattgaaaaaacaaaagttagaggtatgatagatattgaaggaaagttttcaggtgatttcgtagatgtaaaaggtgctttaaatgtaaagggagatattgaagtagaagatttatcattaactggtggtcttgaaagtgatggattacttaatgctgaaaatattcaaatctcacttcgttatgaaggcagtaaggtaagagaaattggtggtaaaaaaattaccgttcgtaaaaaagcgagatttattccttttactagtcatgctggaaacctccaaacttcaattgttgaaggagatgatatctatttagaacatacgattgctgaagttgtaagaggcaacaacgtcacaattggtcctggatgtgaaattagtgttgtagaatatcatactagttttaatcaaaaaggtaatgcagtcgtaaaagaacataaacaaatataagtagtatgagggagagcaagagatatggttgagaagaataataagctcggctttgttgtggcgggcttattgctaggtattttaatggcatcgatggataataccattgtcgtaacggcgatgggaacaatcgttggtgacttaggaggcctcgaaaactttgtatgggtcgtttctgcctatatggtcgcagaaatggcaggcatgcctattttcggtaagctatcagatatgtatggtagaaagagattctttattttcggtttaattgtctttatgattggttcggcactttgtggtactgctgaaaatattacacagttaggtatttatcgtgccattcaaggtattggcggcggggcattagtgccgatcgcgtttactatcgtttttgatatttttccacctgaaaaacgcgggaaaatgggtggtttattcggagctgtatttggattatctagtattttcgggccattacttggcgcatatattaccgattatattagctggcactgggtattttatattaacttaccacttggcattttagcacttatttttattacattcttttataaagaatcacgcgttcatagaaagcaaaagattgattggtttggcgcaattactttagttggtgcagtagtttctttaatgtttgcgcttgaactaggcggacaaaaatatgattgggattctagctttattttaagtttatttggtggattcgctattttaatcatcgcattcatttttattgaacgaaaagtagaagaaccaattatttcatttgagatgtttaagcagcgcttattcggaatgagtacaattattgcattatgttacggtgctgcatttatgtcagcaactgtttacattccgttattcattcaaggtgtatacggcgggactgcaacaaactcaggattattacttttacctatgatgctaggatcagtcgtaacagcgcagttaggtggatttttaacgactaagctgagctaccgaaacattatgattatttctgctgttattatgttaatcggattattcttattaagtacattaacgccagaaacaagtcgtgcattattaacggtttatatgattattatcggatttggagtaggtttctcattctctgtactaagtatggcttcaattcataacttcggtatggaacagcgtggatctgcgacttcaacgagtaacttcattcgttcattaggaatgacactaggtattacaatcttcggaatgatccaaagaacaggtttccaagatcaattagaagaagcatttaaagggatgagcgggggaatgaatacaaaattaggggattcaagagccattttatcagaatcggcaagatctcaaatccctccgcaaatattagataagattattgacgctctttctagttcaattgttcaaacattcatgtgggcattggtaccagctggattagcattcatattcattttctttatgggaaatgagcgtatggtaattaagaaagaacaaatgaataaaaagagtgaaacatcaaaagcgtaatgaaaaatctcctttccaattggaaaggagatttttcgtatgtacggtgttagattagccttcgataatttcgtattcttcgtctgcaagtaataaaatttgcgttttcttgcctttgttttgaacttcgattacatcgtatgcgcctaagtctcttactttgctttgagaagcgttaaccataacttcaatagaatcaattaagatatcttcttcaatatatgattcaggcaatgccatatcttcagtatctaatacacacgcatatagattttgtaaattttcagtagttgggttttgttcctcaacatcaatgatattttttactgcatccatattttcttcttttgcttggtacactttaattttagccataattttaatctcctttataacgtaatcgtagaggctacacctcattataacgttttttttatgaaagatgaaattgttatatgtatttatagtaaaaattatgtgtccttactcaaaattggtgtgatttccatataaatgtacgagtaggtaacgataatgttacgttaaagttatattgtccaagcttttcttattttcttcctatatatatgtagtagcaattctatatagagaagggatggagtgtaagtgggttgtgaaccgagagtttctagagattttgttcaagtacctgaactggtaggttttcgattacttttatcacatccagctggagaccctttaaactacggattattatttattaattttcctgatacgatttttatttttatattggcatcaagcggataccttgccatttcgaactgtttaaaaatagagggcggaactggtgatgccgaaatagaagagatgaaaaaatgatagaggatgacgataatacgtacaagtcagttgttaaattgactaaagtatataagaacggtgagacggaatcttttatttataaaaatgagttataatacatgtatttaaatgaaccctcaaactattgttgagggttgttacataattaattatgttgatcctttaagccatttgttaacgagtaagaaatatatttattgttgacttattttataggttgatcatttcatagttagtagatgttataatcattttatgtttactgatattttataaatattcgaagtttcaatttaatagtcaattgcttttatgatgaacaggtgggtgtgtatatgaatacgaattatggagcgctcatgaaaatgttaagagtggttgattctaaagaaggcgggaatgtaaatgatatatgaagcgaatatacatacaagaaaaaaactagtttctatgtttgaggatttcaataacgttgttttactttcttatttacaagggcatatgggtactgcttgggtaaatgatcttgaaaatccaacagtagcacaagttatggtaggaatttttacattttacgctggagacccaaatacgaaagaaacagaagagttattacgtaatattccagaaagaattttagttatcgtaaatagtgaagagtggaaacaacgcttagaaacattccatgaaagaaaaatagataagtttttacgttataaattcaaacgaaatccagaagtttttaatcgttcaaaattacaatcttttatatcagcacttccaaaagaatatgagttaagaagaatagatgagcatatcgcaaatagccccaaattacataagatatctgaagattttacaagtcaatttcattcgatagaagattatataaaccgtggtataggttatagcattttatataatggagaagttgtatgcggtgcatcctcctatagtatttataatgatgggattgaaattgaagttgcgactgatcacaatcatagaagagagggcttggcaactgtagttagtgcagctattatattggattgcttagaaaatggaaagtatccaaactgggacgcagcgaatactacatctgctaaactagcagaaaagttaggatatgaatttgataaggcatatgatacttattttgtagataatagatgagtgaaggagttacatactaaaaaatacatgcgccctagtacgtaagtctagggcgcatgtattagttggtaaatatcttcataacaattttatcacattttatcttttgaatgtttggaattaaagatatttatgtgactttttgaaaaaataaaagagcagttagcaaaagctaactgctcttctccaagggggaatggagaaatacaatcatgttacctatagtattgacagaacattgagttttaatcagccatttataaaaggagagataaaatatctttgattaatctttagctcccattaggagtactgatagaaaaacgattgagaatatatttttttattacatttacaatttgaagagtagaacgtgtttatcgtaattctccaaacaccaattatatttttttagaatgattggatggactgcttctttcgtagtatcgacttcagtatatccatatttcttataaaagttttctaattcctcaaaaggaagacaatatacattttgtatttgtgatttttttgcagtttctactaaaaatgaaacaagctcaccagctaattgtagccctctaaattgaggcagaataaaaattccgcccatttctaaagtatcttcatctatttggactaatcggccaacgcctgcatactcgttgttatatgtaataattgcaactttatctctctttaaatcactccgtacaaatcctattgagtcatattgattattaacccattctaaatcgttagatgtagccaattgaatactcatatacatcctccttggaaatactagcgctctcttcattatatagaacataagatactatatcaaaagaaccttgagatagcacatttgtttaagttattagttaaaagtgtgggattgctggcattgaaatgatggcttcaccaaacataggataataatcttgtgaatttagtgttacatagtcaaaataaaaattagtttatgtgttcggtaacgcaagattgtttaagtgtagagaaaatcatagggttattttaattagtagctactgtattcattgaagctattaaggaaacgtggtaatcgccagccctagtgatacaaatcatattaggatttagtaaaaaaaattcttcctgaaaaagagggggattaaagataagagcacttcgaaaagtgcccttcagtaacgactacttattctaaaaagaaaggatgcaatatatcatatgaagtttagtgtatttaagtatgggtcttttatataaatgtgaaataaaagagggttgtcttcttattagaaggcagctttttgttattacaaaaaagaattagaaataaaatataaattcagttacttgtccaaacaatttttttgaaaatacataaaatgctagtagttagccaatatttttatattgttaattttttagactaaaaggggtgattttatgtgtgattgtgaagtttgtagaagaaagaaaaaacgtgatccattaaatcggggttctgaaccaaaaaaacaggattccgaatcagtaaattcttattcatttagtaaaaatgcaaattttttagaagaagctatacaaacagatgaaatcgatcaagtttctgaggaatatattgaaatagtagattcagcagatgtacaagttactactacagatacaaaagctgcactatctatccaagccgcgttacaagcagctattgtggttgtagtaagtatttctatagcagatagtgaaaaggcagataaaataacacaagaattgtttcaaaaatcatctattaaacaaattaatagacaaaaaacatttattaaaaattccagaaacgtaaccgtaacaactactgatacagatattgcagtgaatattcaaattcttcttcaaattttattagcgttattagttaaactaaacattttataaagtgtctatcctatttatatttagctataagggttcactctaagtaaatattttttgttgtaatatgtggtacaagcttggactttctcattatgactgaattaatattcaaaattgatgggaaattaagtgtggaaaactacacaataacaaaggtgaacctattatttaacagtgaataaaacttatatatgtgaagtaaaggaaagctgtcttcgtattagaagacagctttttgattttattagtaaaaagccgtgaaaataaaagattaagttacttgtccaagcattttttatttaaatacatataatgctggtagttaatctaaatttttatagaaaactgataggagtgaatattgtaaatggatgatttaaataaattttcttcctttaagtttgataaggatcaaaagaatataattatagaccttttactctcagatatttttaataggcatgggataaatgaagaaaaactaaaaaatttatcaccagaaaaaaagcagcaaattaaaagtattgtttctgaaatacaatcacaagttaataattatttagattgaaagggggtgaatgtatgaaaaaaacatgtcattcagaggaaaataaaaggtggagtgcattagactcctcaaatcctcatccatcttttaaaaatgctactgtttcagaagctgcagcacaagaaagtaaaacttaccaaatttctgaagaatctattacaattgtagattcagcagatgtagaagttacgactacagatacaaaagctgcgttatctattcaagctgcattacaagcagctatcgtggttataataagtatttctatagcagatagtgaaaaagctgaccgtgtagcacaagaattgtttcaaaaatcatctattaaacaaattaataaacaagaaactgttattagaaattctagaaatgttacagttacgactacagatacagacatagcagtaaatgttcaaattcttctccaaattttattagctttactagtaaaattaaatattttataaaatgtttaaccttctttagatatagtgcatcttacaggtaaatattcactgttttaattatagtacaggctataaatatttatcataactggattaatattcaacatcaccaaagtatgaatgtaaacaaacaatgtgatggaaaataaagtttggttattttatgaaaattgaaaagccatttcctttattggatttggcttttcaattttaaacagtatgaatttgaaaagataatattaagctaaagaagtaaaatatactgatacaaaatacttataaaattactcgtgttatagaaaaataataagaaaaaggtgtttaaaatagaatcattttcattaatagttcaagttttgaagaatagtgcatacaatataaagtgttttcctttcttcatttaagttttacgtatataatttaaaagtactatttttattttattattttatatttataacagaatagaggtttaaaaatgagtgttaaaatcattacggatagtgcggcggatttaccagtagaattgctgcaagcatatgatattgatttaattccactccgtgtatatgatgaagcagaaacagagtatttagatggagtaacattagagtcagttacattattacaaaaaatgagagaaggcgctgtttatagaacatcattgccttcacttgaaactttccaagaaaaatttgtttcttatgcaaaagaaggtaatccttgtatatatttagctttttcatctgaactgtctggtacatatcaatcatcagttgtcattaaagaggaagtaaaagaaacatatgcagatttagatttagaaattattgatacaaaatgtgcttcgcttggtcaaggtcttgtcgttttagaagctgctaaaatggcaaaagacggcgcaccaaaagaagatattttaaaccgtgtcgcttttctaatgaaccatatggagcacatcttcactgtagctgacttacagtaccttgttagaggtggacgtttaagtaaagtagctggttttatcggtggtttactaaacattaagcctatcttaaacgtggaagaaggaaaacttgtaccacttgaaaaggtaagagggaaaaagaaagtattaagccgaattgttgatattatggaagagcgtggtaaagaccttaaaggtcaaacaatcggtatcactcatggtgatgacttagaaacagcggaagcattaaaatcattaattacggaaagattcggttgtgaagtatttatcgtaaatacaattggtgcagcaatcggagcacatacaggacctggcgttataacgttatttttcttaaatgaagtagagtaaaggattgatcatttgatcaatccttttttctttaatctgtgattaccggtcgatatggtattggtgaagataaaatctttgaagttttcctatatgaattgctctcttgtagagggagtattttttatatgtggaatgatacttaatggtagaagaaaagagtataaataagaatgtatttgtaggaatttaaatatttgaagatatcaaaattttgccatttcatatataattgtgtggggagaaatatctgtaactatttgtaaaaataggaggcgactataaaaatgcaagaaattgctagatgggatttaaatcgcttgtatttgaatgaggatattctatttccaattttggagttgaaagagaaatattttgtaacaaaagatgtagaggttctttcaaagctaatacaagctattgagaaaacagaatactatttgtactgtagatcagttgaagaaagtgtaccatctgaccttactaaattgaccgtgaaagtgaaggaactaaaaaatgaattacagcaagtaataaaacataatgaagtggaaacttcagataatactaagttaataaaagatgagcttaatgcttgggaaaatatgtacatacaattacgggataggatagaaatagagcacaataataaacaattatcctttggacaagcaaatactattgcaatgaatagtgataatgaaaaggaaagattagaagtattcgagttacttacaagtactttacataaggaaaaagaaatctttgctactgtattaaatcaaatagggagattgcgtaatgcaaagagtaatgaaatagaagatagagagattttaacacaatcttttcatgcgaatggcatttcagaaactgtattattccaaatgtggaatgcgacagaagaaaaccttgataaattagtaagtgctttaaacgtgtataagaaaggaaaagcttcaattacatggcatgaacttatgacggtaaaggaaagtaatgagatcatgattcctttttcagtagcaatacaaaacgtttatgatgcatgtaagaatattgatgaagaattagcagaatttgcacgtaatgcgatagaaagtggttgggtagatgctgaaccgagagagaataaaccaccaggtgggttttgtgctccatttttcagtgagaaagaatcgcgaatttccattcgttatgatgggagtatagatagtgtaagagtgctcgctcatgaattaggacatgcttggcatttttataatatgagttttgaacaatctacatcttttttagatgattatttgccaatgagtacggctgaatcagcatctattttctttgaaacggtactcttaaattatctaattgaaacaacggatagtaaagatatgaaaaagtcattacttagctggaaaataagaaatagttttaattatgtaatggcaatacgagcatcgtatcagtttgaaaaaacattttatgaaaaatgtaaagagggtcctttaagtgctgatgaaattgagaaattatctataattgcacaaaaagaagcttatggaaaagctttaagtgaataccagccgtttgtatggatgaaatatattcaattttatatagcagatgttcctttttacaattatccatacacatttggatatttagtaagttttagcttattagaaatagctcaagaaggtaaaagtacttttcattcgaaatataaagagttcttacgagaaacaggaaaggctccagtagaggagcttatgaaaaaacattttgaaatagatataagaaattatgaattttggaataaagcttttattcaaatttctaaagacattgatgaatatttgcagcttatgtaaggggagagtacagtggatcagcagtttataaaaggtatacctttttcaactttagaatatgcaaaagctataagtttattaaaaggttggctacatgaacaacaagagaaaccaaggtttgtagtaactgcaaatcctgaaattgttatgtctgcaaaggaaaatacggaaaaatcaaaggagtttaaaaagatgttactatctgcggatttaataacagcggatgggattggtgtcataattggctcgaaaatattaaaaggaactttgaaagaacgtgttactggggcggatttaactcacgatttaataaaatattgtaacgacaatgaatatcgtgtctttctttttggagctgcgccagaaagtaataaaaaggcattagaaaaattaaatgagcagttcccaggagcacaatttaaaggacagcatggatttgtaaatggtgaagaaatagaagaaataaaaatgaaaattaagcagttcaagccgcatttactactcgtaggactaggttcaccaaaacaagaagagttcatctatgaaaacatacaaacattaaacgttccgctatctattggtatcggaggcatgattgatataatatctggtactgtaaaaagagcaccaaaaataatgagggatactggaactgaatggctgtataggttactctcacagccgaaaagattaaagagacaacttgtacttccgaaatttttattatcggttatgtctgagcggattaaagggattaattaataaaggggactacatacataaacagaatcggcattatcggagcaatgcaaattgaaatagatttacttttaaaaaagctagtaatacaagaagaacagacaattgcgggaatgccattttatattggagaattcatgggaacagaagtaattattacacgttctggtgtagggaaagtaaatgctgctgcatgtgtgcaaacattaattcataaatttaatgtagactctatcatcaatacgggcgttgctggtggattacatccaggtgtaaaagttggcgatttagttatttcaactaacgttacccatcatgattttacatatataaaagaaaataattgttccatttacattgctagtaatggtttgaaagaatatttacgagcaatcgtaacttattatgctttagacaagtgggtgacagaaacgtttagtattgaacaaatacaatcgctaaataaaggtgacttagttaaaagtattatgaaccaatatgatataaaagaggcagcggtagttggtgaccggctatgtgatataaatgcagcgaaagacaacggtttacttgcaattgggtgcaattttgattttgcgcaagaagatgaacttgctcaggctgatgtagtaatagatgatttaatggagttgaaggggatattacctgctgtacagaggtaaataaagtgtgtgcgttttttgccaagtcctatatgtcttagtttatggagggaatatgattaaaaataattttaaaattagtaatattcctgcggttttatggggagataagagtgataaaatttttattgcagtacatggaaatatgtcaaataaggaagatacaattattcaaatattagctgaagaagccaaacaaaaaggttatcaagtattaagctttgatttacctgagcatggagaaagaaaagatgataatacgccttgcaaagtacagatttgtgttagtgaattatctataattatgaattatgcaaaagaacattggaaagaaataaacgtgtttgcatgtagtatgggagcgtattttagccttttagcttatcaaaatgatgtggtagaaaaggcattatttttatcaccagtagttaatatggaacgaattatcgaaaatatgatgaaatggtttaatgtaacaccagagcttttgcaaaaagaaatgactatagagacacctattggtcaaaagttatattgggattatttatgctatgtaaaagaacatccgattaatacatggaatatagatacatatattttgtacggagccaaggatgaactgtgtgaacttgaaactattaactattttacagaaaaacatcgttgtgaattagaagttatggagacgggtgaacattactttcataccgaagaacagttaaagatatttgaacagtggttacacaagcatatcgattaacaaattacaatttattttgaacctgttagagaagaatgagaaatatataaacttatagtatatttgagagaatttataaatggtgaatgtatacacttaaacaaacacatgctttaattcgataagaattaaacaactttaaagagccttatcacacactagattgtagcaaggctcttatattttcataataaaattaatcaactgtattatcgatttacatatgaagtgaagaatacgcacgctataaattacataaagtaacaaccataaaaatgctcagaataaaagattctcgagcatttttatgtattttcatacttagggggaatggacttgaaagatatacatattcaacaaatagaaaatttaatggaatatgaattcagtcatctcgttcaagacagtgaagaagaaggttttaatttccttataaggctaataaatgaatataaaaacaaaataaatgtattcaataaaactggagaatgtttatatggtgttttccaaggtgatatgttaattggagttggaggtttaaatgaggatccgtacacaaaagacaataagattgggcggttaaggagattttatatttcaagggattatcggcgtatagggttagggaacttattattaaaccaactattatgtcatgcggaaaaatattttgaagtgattgttttacatactgacacgaagcaaggggatgtgttttatactgcgaatggatttgtaaaagggggattatataagggatcgagtcactacaaactattatagagattgctatccaaataatagctacgaacaggttttttgttggtaaatcgatatatcttaaaaatcgctgatatatgaagttgcgatccttatattaaaagacaacttttataatttcatttactaaattgttattataaaaaagagcaccttagcttttaaaatttagcttataaggtgactccttttcagtcaattacgttttaacgttcatttgtttcaataataatcctggtttaccttttacataataaaaatgcgggttattttcatcatcataaagcataatataaggcttttcatttagtgggagcagtataagtacttcgtctattgtagtgtgtaaccattgattagtaatagaaaccggcttagataatgggatttttatcatatagccatcttttggaacgacatttaagtttttaaatggaccagtaattgctttagcgtattgaactgcttctttttggactattggatctaaagattgtttttgaatgaccatttctttttgacaatcaaatacttcaatttgttgatttgtatttgcgaacgcatttgttgataatagaaatagaagaagagaaatgaccccgattttttttatcatagtacaacacctcaccattactatcccctcaaaagctttaaatatttttctgtcacattcatgtaacaaagatgttgtatgatacaattggtttttgtttaaaagcaatggaggaaaaaatatgaaagttttaattgcagatgacgaacaagatatgttaaggattttaaaagcttattttgaaaaagaaggctttgaagtattattagcgaaagacggagaggaagcacttcaaatattttatgatgaaaaaattgatttagctattttggattggatgatgccgaaacatagtggtattactgtctgtcaggaaataaaaaagaattcaagcgtaaaagtattaatgcttacggcgaaaagtgaaagtgaagatgaattagcagcgcttcaaagtggggcagatgagtacgtaaaaaaaccatttcatccaggagtactaattacacgagcgaaaaaacttattcagcatgatgatattattcaagtacaagatgtaaagataaatttcgccaaaaataaagtatataaaaatgatatagagttagaaattacaaaaacagagctcgaattaataaaatgctttttaaatcataaaggaactattttaactcgtaaaaaattgttagacattgtatggggatttgactattttggagaagagagaacggttgatacacatgtaagaaggctgcgtaaaaaaattggagaaaatattattaagacgcatcgtgggctgggttatagtttggaggaacaaagtgaataaacttgggaaaaagctatttctcagcatttctttaaccgttattcttatatttacaatttctttattattaattaactttctcttgccgaaatataatatttataaaacacgtgaaaacttaaatgaatttacaactcaaatacaaaatgcgccagtcaatgatttagaagatattattcatacaattgaaagtgaaaataatgttacaattgcgtatacgccaattaatcagtcagaagatgctatgaacgacgcgttacgcatgcaacttacgaaaaagaaagtaacgttaaataagctttggattacgaaagacgaagttatgaaagtgaagacggaagggcaatcgaataaactgtacgatcaaggaaaggtaaaagcgagtttttttgctaaatatattgcgaaagatgatacgataattttaattgggacttccattgcgaattcaaatgaaattataaatacgttaaatacattttacttatatatcctatgtttctcgctccttcttattattttacttgtgtggatactttcaaaaataataacgacaccactgaaagagttaagtgatgtggctcaggatatttcacatttgcagtttaaaagaacgaaagtgaaaacgaatgatgaaataggagagttggccaatagtattaatatcatgagtgaaaaactacatgaagcacatcaagacttaactgatcgtaatgaacatttaaaacgatttatgggtgatgtaacgcatgaattaaagacaccgatcgcattagtaaaagcatactctatggggattaaagatggattagatgatgggacttatgtagatacaattattaaacaaacagatcaaatatcaaacttaattgaagaactattacgattttctaaactagaaagagatattttacaaaaagaagaattccccattgaaccactggtccagagtatattagataagcatcagattgaactggattcgaaagaaattaacttgcaagtaaattgtaatacgggcgatacaatcgtttatgcagatttaaataaaatgagaatggtgtttcaaaatttaatttctaatgcgataaaatatacagcaaatcaaaacataataattacattagaagatagaaataaaagtatatatttccaaataaaaaatggcattcctacggataaaattaaggatatcgagaaaatttgggagcctttttacgtactagaatcttctcgtagtaaagaaaaatcaggtacaggattaggtctagcgatagtgaaaagtattttagaaaggcatggttttgaatatggagtttcctctatagatggagaaattcaattttatataaatgtgaaaaaggactaatgaaaatattagtcctttttgcagctttagagattagcgatacaggatgaatcaccataattttcaaaattgatgtattaaatggagaattagcaaatgttctactttcattaaattcacgtgaagttcacaggaaaacgttatatttacatagttatatttgaatttaatgaagtgaggtattcagatttgaaaagaaagaaattagtaattggtagcattttaatggggatgacgttatctttatctgcatgtggttcatcagataatattgtaacgacaaaatcaggaagcatttcagaaagtgattttaacaaaaaattaaaagaaaactacggtaaacagaatttatctgaaatggtagtagaaaaagtattaaatgataaatataaagttacggatgaagaggtaacgaaacaactaaaagaattaaaagacaagatgggcgataattttaatacatatatggaatctaatggtgtgaaaaatgaagatcagttgaaagagaaattaaagcttacttttgcttttgaaaaagctattaaagcaaccgtaacggaaaaagatattaaagatcattataagccaaagcttcaagttagccatattttagtaaaagatgaaaagacagcaaaagaaattaaagaaaaattaaatagtggcgaagatttcgcggcagtggctaaacaatattcagaggatccaggttctaaagaaaaaggtggggaactatctgaatttggacctggtatgatggtgaaagaatttgaggatgctgcgtataagttagaagttggtcaattgagtgaacctgttaaatcttctttcggatatcatattattaagctaacggataaaaaagagcttaaaccgtatgaggaagagaaagagaatattcgtaaagaattagaacagcaacgtatacaagatcctcaattccatcaacaagttactagagaactgcttaaaaatgcagatataaaggtatctgataaagacttgaaagatacctttaaagagttagaaaaataataaatggaatgtaaggcaagcgatagaaatatcggttgtctttttctctatttatcccgctatttgccgggcagtaagaccccacctcaaaattcagcgaaagcaaagaagtggccctgctgatcgtaaacgcccaattggtgagggctgattaaagtttcactttataaagaaggaggaagtgggaaaatactttcatacctgcattaaattttacttaataagaaatctttgagtttctcaacttttatataaaataaaactgaattttcagttattttgttatatagtaaaagagaacgaataaggggagggaacattttgagtaaaaagaaaatggcaattacactgtcagcaatgctatctgcaacaattatacctagctttactatggatgtgcatgcagagaagaaggaagagactaaaagtacaaaaattgaattagaaaatgggatgacaaaaccgatttattctctcgatgaagctattatcgaaaatttatatgtagagacagaagttgatagtgatcgagacggtaagaaagacagagtatcgataaaagttatgcgtccaaagacagatccgaatgtgaaagttcctgttatttatgaaatgagtccatatcgatctggattaaaagatgttcctgtatataatgtagatgaagaattgtatgcgtatgaaggaaaaccgtatggagcggttaatcttggttcgtatgggaactattacgtgccaagaggttatgcagttattctaggcgaaagtatcggtactggaaaatcagatggatgccctacaactggagatgaacaagagatactcgggacaaaatctgttattgattgggtaaacggtcgcgcgaaagcatttacagaacagggtgaggaagttcaggcaaattggtctacaggaaatgtaggtatgactggagtttcctataatggtactttaccaaatgctgttgcgactactggagtcgaaggtttaaaaacaattattccaatcgcagcaattagtagttggtatgattattatcgtgcaaatggtgcagtcattgctccaggcggatatcaaggggaagatacagataatatggcagaagcagtactgacaagggaaaaccctgaagtttgcggacaagttataaaagagttaacggctggacaagaccgaaaaacaggtaattataatgatttttgggataaacgtaactatgtaaaagatgctaaaaatgtaaaagcgagtgtatttgttgttcatggtttaaacgattggaatgttaaaacaaaacagttcgcgcaatggtgggaagcacttggagaaaataatgttccgcgtaaaatgtggctacaccaaggtggtcatggtgggacatcaagtaataactggcagcaaacacaaaataaatggttagattattggttgtacggaattgaaaatggaattatgaatgaaccaatggttgatgtgcaacgagaaaataaaacgtggcaaaagataaaaaattggccagatccagcggctgtaccttcaaaaatccgtatgtatttaagtaataaatcagtcaatttaccattaagtatgggagcggctaataaagttttctcattcttagatgatgcacaaatgaaatcaaaccaattagtagcaaacccagaattagaagtagcaaatcgattagtatatacaatgcctgtactgcaaaaagatacgcgtataagtggtacaccaaagatttcaattacaggaaatattgatcgatctgtatcaaatttaacagcattacttgttgactatggaggagcgaagccggaaatcgtaacgagaggctggatggatccacaaaacttaaagagtatagaaaattcaacagcgattcaaccgggcaaagattatacatttacatgggacatgcagccagatgattatgtatttaaagcggggcatcaaatcggagttgttttaattgcaagtgattatgattatacaattaggccgaaagctggcacgaaacttacagtgaaattaagtgaagtgacattgccgattgtgaaataaatattttttctaaagagcttactaaagtaagctctttaatttgtagtctgaatttttaatttttatatttcaaattggaaggttatgtaatacaatatcattatattctatggaaagtgagtgatatattatgacagttagctctttcgaaatatcattaaaatcagaggtgcaggaagattagttgaattgaaatcttccgtacgtaaaaacggaggagaaaataaatgtttagcttttatagtacactttgtacagaactgtatgattacacaaaaccagtcggttattctttaaatggtgatattgagtattacaaaaaacggttaaaagattgtagaggaagaatcctcgaagccgcagtaggttcaggacgtgtcatcattccgcttctagaggctggttttaaagtggatgggatagattattcacctgaaatgctagattcttgccgtaagcgctgtaaagagagaggcttacatcctaatttatatgaaggaagcttgcaacaattttcacttccgcataaatatgacgcaattatcattcctactggatctttttgtttaattgaaaatcgtgtggattctataaatgcattgaaatgtttttatgaacatcttaatccagatggacgattaatcgtagatattatgcttccgtatgactggaagactggggaaattcatacatcgactttctctttgccgagtggagacggaatcacattagaaaataaatcaattgaaatagattggctgaaccaagttactgtatcatatttgaaatatgaaaagtggagtaaaggacagttagtacaaacagaactacaacgctttgcgctgcgctggtatggaatagaagagtttaaacttcttttagaaagtataggtttctctaatattacgtgctctgctgaatatgattatgaaaaagaaccgtcaaatgcaaatcaaatgattacttttgaagctgtgcgaaaagaatagaactaaaactatgaataaaaaataaggcaatcgatttaaaatcggctgccttattttttattttatgtaatggtttatagagaaagattggagggaaataaatgaaacttatattaatatttggcccacaagcagttggaaaaatgacagtggggcaagaattagcaacattaaccggtttaaaactttttcataaccacatgacaattgatttagtaagtccaatttttgattacagtacgaaagaagcaaaaagactagtaagtttatttcgtaatgaaatatttgaagaagtatctaaaagtgatttatctggaatgatttttacgtatatatgggcatttgacctccaagcggattgggattatatacatcatgtagaaagtatttttgaatcaaaaggtgggacagtgcattttgtagagctggaagcggaattagatgaaagattagaacgaaataaaagcccgaatagattagaacataaaccgaaaaaaagagatattgagtggtctgaaaataatttgaaagaaacgatgaaaaagcatagattaaactctcttcatggtgaaattgaaaaagaagagtatataaaaattaataacacgtatttgagtgcaaaagaagtagcggaaatgattaaagagaagtttcaattgtgaaatttttgaagtctatttcgttttcgttgtccaagcattctcctactaattacatatactatttatgttaaagtcggctactattttatatagggctgttattttcctataaatgctattttagtgaagtgggaggaatcaatttggaaaacgtagaacaagatagaattgaaaatcaagtgtattcaaatcgtgtagtaagatcagaatttgattcgaattgggaaacttgtatatcaaagagtggttatgtaatttatgtagcaacaagtaataatgctgaagtaatagtgcttcttgcagatggttcaagtaaattattaattttcgaaaaaggcggtaaagtagtagttggtggcggtggaacaagtcattacagtaagccgcatattgcaagaaatatttaagatagaacatgttaattaagaagaagctggaaaacggttgtcattcatgtttagggcatgatagacgaaccgttttttatttgtttataaatttagaagaacttcattgattacaaatacatcaggatgagcagcgaaattagaagaaaacttggtgggtaatggtacaaaatattatgtaggtttgcaagaatcttataagcgatataaaaaagcatttcctatttggggaaacactacttctatgttatagtataatagtgtttttagatggtgctattttaatatatttataattttgttatgtattatttttatattaaataagcgtctaaagtattttttgatataaggagtaataattagagaaatgaaaaatatagactttatactagaaagtgatgaggcattaaaaccgtctgaacgattagtactattattattagagaagcatagaatgctatatacgaacgatctattggcattatcaaatttatcatataaaacattaacagattcattaacggcgctagttttaaaatcgtatgtgttaaaggaaacgggtaagggaagaagacagaactgctatagattagtatgataaggcagctgttttagagacttttacatatgttttttcaatcgtaaggtggaagtgtgttttttgttttcaaacgaaaaaattactataagaggggttaagatagtagcgtttcatttttgtaaatgtaattatttcatcattgaaaatacaaaaatgaaataaacagtataaaaaagaaataaaaaaacaatccattttaaaaagggattgtttttttattggaataatattatttgatatgttgaaagcatgaatagcagaatagacattacctgttttattttatgcaaatgaacaaatatgatgaaaactatgtgtatagttttttgcttgctttttcagtaactctaatgaaattatggtcttcattgtttaaaggcagtatttttaacattattgctattcagcattaagcacaaaaaagtaatatatataatattattatgtaaacttaagattttaaaaggaaaatataataattaatagaacatgtagaaggagatgcttaaatattttgaaggatgggagattattatggagcatttacaatcaatagcacaagctgttataagtggtaataaggaaaaagtagtgaagtttataaaggcgagtccaagcattgttaacgaatgtagtgaagatggctggacaccacttcatttagcagcttattttggacagaaagaaatagcgagttttcttttagaaagcggtgcagatatacatagtagagcgaaaaatgaaaatgaaaatacacctttgcaagcggcaattgcgaacaagcaaagtgaacttgtcgctttcttaattgaaaaaggatcagatgtaaatattatgcaaagtggtggctggacaggactccacgaagcagcattattaggaaatgaagaaataattatgttgctccttaaaaatggagctaataagatgattaagaaaaatgatgggaaaacagcgtatgatattgcattagaaaaaggatataatcaccttttacatcatttgaaacaggaagtgaacttatgatgaataaatggagtgttggtatatttttatttaatgaagtagaagtgttagactttgcagggccatttgaagttttttctgtaactgaggtgaatgaagaaaaaacatttactgtttatacagttagcgagaatggggaaatgattacagcaaggaatggattgaaggtacagccagattatagtattgaaaatttaccaccagtggatattttaataattccgggtgggctaggtgctagaaaatatgaaataaaaaatgaaatagtaataaaatggattcgccaacaaatgaaagaagtaaagctgatgacttcagtttgtacaggagcgctattactggcgaaagcaggtttactggaaggtttaaaagcaacaacacattgggctagtattgaaaagtttaaaaatgagtttcaaaatgttgaagttatagaaaatgtaaagtttgtagatgaaggacatattataacatctgccggaatttcagctggaattaatatggcatttcatattgtgaaaaacttgttaggtgtgcatgttgcggaggacacagcgaagcgaatggagtatgatattagtttgccaaattaaaaagcccggattgggctttttatattgaatgaatatagttaagctcttcatcactcaaaatagggcgaacagatgcatttgcattttcttgtgcttgtgttcctgtttttgcaccaggaattacaacacttactgccggatgagagagtacatagcgaagtgcaagttgccctaggatctgatttttatttgagagcagccgaagtttctctacggtttgtaagtcttcttgaaaccaaatttcatttggccaatctttgcgtaaatctccatctggaaaaattgttttatttgtgaattttccagttaaaatgcccatttttaatggaccacgaataacagctcctagatttttctcttgtaagaatggtaatatatctttttctggttttcgatttaatatattgtaatcaagttgtacgatatcaatttcgttgttgttattgaaatgatgaatgtattgtaaatcatgagtcgaaacaccgactgctcttactttgccatcacgttttaatatgtcaaatgcacgtagaaatgcttctgtttctctacgattatgccaccaaatatgacaaaaataaagatcaatataatctgtttgaagacgttgtaaacttgtttcgaatacggcgatgattttttcgggagtatcatatacaggaactccattagggtcgtagtgatgtccgattaaaccacctttcgttgataggataatatcattacgatgtcctttaatcgcggtagctaccaacttttcactatgtcctaaaccatacacatccgcagtatcaataaaattcacaccacactcaattgctttttttatagcggttatagattgtttatcgttaacaggtccccattcatcaccaccgattgcccatgcgccaaaacctatttcagaaacagttattccagttttacctaatgtgcggtaatgcatattccccctccttgtaagcatgttataacatggatatgtggggaaggaattttgtgtgtgaaaaaactcttctacaatagtagaaaaagaattacagaaactactattttatagcagcatgtataaaaaaaatcggtgtaaatatggaaatgtcgtcgaatgctatctttaattggttaatttatgggatatttttgtgaaggagtttattttataagaatagaatttagtttagtaagaaaacgtgccgatggtagtgaaaaatatgggttagggggatttgaatgaggaaactcgagcgagtaaatgttcctaatataccagagcaattatcacaacctagtgacaagcgtaggataaataaaaagaagttaaggcgacttattttaatggtcctttttattgcggcaactactctatatgttcaatatattttaacgaaacaacaagaagtaattgataaaaagaaagatacgattacggatcaaaagaagcaattagtatctttaaagaaagataaagattctttaaagactaacatagaaaatttaacagacgatgaggaagaaattttgaagttagcgagaaaagagtatcaattttctaagtcaaatgaaactatatttgtgatgccaaagtaataaaaacagttagccattgaactgcacccccaattgttagacaccgtctaacaattgggggtgcagttttttatgtatgaatgtcatggtacaaggaacaatcacatattgtagaaatgaagagtttaagctattttcataaatatggaatatgcactaaaataaatgttgttaaaattctgtcaattatattataatacaaggtaagcggatacattttttaatcaacgttgagttcctcgctcatacgactattaagaaacccgttatcctcgtataagaaaggaagatagctgtgtacgcctcaaatacaatttatatcgtaggggatgcgaaagcacctcaaaataatcccattactgaaaagtttaaaagctatttcgtagcatttatacttgttaaggatacaggggaaattgtagatgcagactgctcagcgacaattgcattaacatctcaatttgttaaatatttatttctacataaaaatataaatgacccggcgttagtaatggaagtaaagaaccgatatttcggttcttctcaaaaagcgttacttgtagcgctaaaagatgcacagaaaaaatataatcagattgctgctttgtctactcaatcatagacaaaatccagccgtaagaatcattcttatggctggatttttttatttcacattatcgtcctacatcaaaagtgaacgaaaacaaagtagagagatagaagagtaaatgcccaataggtttacctaataatccgtgggtataaatctccggtggattaaaatttcacttcattggagaatgaaaggatgaacaaaatgaaaattacagatgtaaaagtaaatcgtagacgtgtaaaactgcatacaccgtttaaaaccgcgcttcgtactgtaacagaaattgaaagtatagatgtttatattcatacagacgaaggagtgattggtaagggggctgcagccgcaacgccagttattacgggggatttcaccagcggaatggaagaagcgattttaggaccgatgcgttcatgtttaattggtcaaaatatcattcagtttcagcagttactacagggcattcaaatgagttgtattggaaattcaagtgccaaagcagcggtagatatcgctttatatgatgtatattgcgaatatcaaaatgtgccgttatatgcattgttaggcgggaagaaagaaattcataccgatattacagtgagtgtggatgagcctgtattaatggcaaaagaagcgaagaaacatatagaaaaaggatttcaaacattaaagattaaagtgggtaaagaggcgcatttagatttggaacgtattgaggcaattcgaaatgtggtaccaagaaatacgatattacgtttagatgcgaatcaaggttggagtccaaaagaagcggtctctattattcaagagatggaaaatcgtaatttaaatatagaatttattgaacaaccagtacacgcgaaagattgggatgggttaaagtatgtcaaagatcgtgtgcaaacgccaattatggccgatgaaagtatattttcagcaagtgacgcattaaagctcgttcaaggaagatatgcagacttcattaatattaaattaatgaaatgtggtggtatacgtgaagcatggcgtattgcagatatcgcagaaacagctggtgtgaagtgtatggtgggcagcatgatggaatcttcactttccgttagtgctgttgcgcatttagcggcagcgcatcctaatattcattattttgatcttgatgcaccgctttggttaatggaagagccagaaggaatgacttattctggatcaaaggtaaaccttcaatcgacagtgaatagtaagtcttaggagaagagactagtaaactatcttttaagggggataaatatgaaaaaagtaggaactgcatttttaacaactttatttatattttcatcgtttacatcggcaaatgctgaagaaaagaaggataataaagcatttatagatgtatctgctgcaacgttatggacagtacctgattcattaaggccaatcgatacaccgagtacaacaaatccagtggatctatggaaatggacgaaatcaatgacacttgacgagaaactatggttaacaaatgcaaataaattagaaacacaagcgttactcggtcaagaagtaactgttattgataagaaaggcgaatgggtgaaggtattagtgcatggacagccaacaccccgaaatgaagaaggttatccgggctggatgcctgaaaaacaattaacatataatcaagaatttgcagataaaacaaatgaaccttttgtcttaataaccaaaccaacagcgattttatatataaacccttctgaaaaacataaatcacttgaagtcagttataatacaagactgccgctattaagtgaagacacaatttcataccgtgtattgttgccaaatgggcaaaaagcatggatacgtaaaaatgatggaacagtttaccaatctcaaactgatattccaactccggcggccgatgatttaattaacacagggaaaatgtttttaggattaccgtatatatgggctggtacaagtggttttggatttgattgctctggcttcacgcatacgatctataaatcgcacggcattacaattccccgagattctggaccgcaatcaagagcaggagttgcagttgataaagaaaatctacaaaaaggagatttaattttctttgcacatgatcaagggaaaggtagtgtccatcacgtcgcaatgtatattggtgatggcaatatgattcactcaccaagagctgaaagatcggtagagattataccgctaaatacaccaggatatatagaagaatacgctggtgctcgtcgttacttaccttaaaaatagagggggtttttaaatgaaaaaagttgttcgttactcattagttagtactctattagtttcttcatttttagttggctgcgcaaaagaaaaaactgcaacaaagcccaaagatgagaagaaagtattacagttactagaaacgggtgaaattccgtcgttaaattcagggaaagtaacagatgcagtctcgtttaacgttttgaataacgtaatggaaggactatttcgtctatcgaaaaatgatgaagtaattgaagccggcgcacaaaaatatgaagtgagtaaagatggaaagacatatacattccaattgcatgatgcgaaatggtctaacggagatccagtaaccgcccatgattacgtatacgcttggaagcaattgattaatccagatacagcttctcaatatgcatacattgcgtacgatgtaaaaaatgctgagaagataaataaaaaacaactaggtctagatgaattaggagtaaaagcgaaggatgataaaacattcgtcgtagagctagaacatcctgtaccgtattttacgaaattattaattttaccatccttctatccaattaacgaaaaatatgcgaaagagcaaggtgataaatatggattagaagcaaataaagcggtatataatggaccgtttacattatcagagtggaagcatgaagctagctttacaatgaagaaaaacgataagtattgggataaaaaagaagtgaagttagatgaagtaaactatcaaattgtaaaagaaatttcaactgcggtaaatttatatgaaacagataaagttgatagagctgttatttctacagaattcgtagataaatataaaaataataaagagctaaaacaatatacagatccagttatgtacttcttccgatttaatgaaaatgtaccgattcttaaaaataaaaatgcacgtcttgcgctaagtacagtttttgataagaagggactcgcagattcatttttaaatgatggatcggttgcagcgaactattacgtaccaaaaggatttttaaagggcccagataagaaagattttagaagtacgtctggtgagtttaataagacaaatgtaaaacaggcgaaggaatattgggagaaagcaaaacaagagacaggtacaaatgaagtgactttagaattattaaattatgacttagaaaactttaaaaaagttggagagtacattaaagagcagcttgagaaaaacttaccaggattaaaagtgaatgtgaaattacagccgcatacgcaaaaattagcacttgagaagaagaaagaatatgaaatgtcgttatcacgctggttaccagattatccagatccaatgacttacttagaagtattcctttctggaagcagtgttaataatacagaatatgcaaatccagaatatgatgcattaattaagaagattaaaacagaattaggtaatgatgaaaaggctcgctggaaagcaatgcaagatgctgaaaaaatgctacttgatgatgcagtaattgcaccggtattccagcgtggattatcttacttacaaaaaccatatgtgaaagatttatatgtacatcaatttggtccagctacaagtttaaaatgggcagatttacaaaaataaaagaatggggaaacagacttcacgtatgtgatagtctgttttttcttatttaaagttagaaaaatagttcatggtataatttattagtctgtaaacagtatttgaagggaaaatgatgtctatgtttgaagaagagaaagtaatttatacaaaaagattatttatgaggaaaccaattgtagaagatattgatcagttttataacatattaaaaaaagatactgttggcaaatggctggctaaatcaagaggaatgtcgaaggaagaaacaaatgattatattgggcaacttatcttacattgggaacagtatgacttcggggtatggttgttatttaatagtgaaacaggaaagcttttaggacattgtggtttaagaaaggtagatgaaacaggtgaaatagaaattatgtatcttcttgacccagaacattggaggaatgggtatgcattagaagcagcagaggcttccattaaatatgcaatagagactttgaatgtaacaagaataattgctagagttaaagtagcaaatgagagctcgaaaaaacttttacgaaagctcgggtttatatatactcatgaagttgatcatagcgggcgcttattatcatattttgaactccatacatcatccaaagaattctagacatttcatatattttttcattgttaaaaaataaaattattactaaaattccagtgtgaaatttatgtagaatcttgtataattaacatgtttctatggaaacattttcttgcgctatttatatagggcttaatagaacaaggaaggaaatacatacatgtatataatagataaatagaatggaacatgtatagagacaaaggagagaaaagatgacgtgtcaaaaacaagggttacaatttaataacgatagaaagagggacagaagatgaaaatgaagcatgcttttggtcctataattttagcgtgtgtgctttttttcattatcattctaatcccatcgaaaagtttagtatcgcttattagtgataagaaggtagaagatgcggcaacttctttacaaaaagagaaattacaaagtgttttcttacagcaaaaaatgttagagaattcacagtatttaccgatgtacggttcatcagaatttttacgaatggatgcatatcatccgtctaattatttcaaagtaaatccagctggttttacaccgtttttaattggaactggtggtacacaaagtttagctcatattttaaatatgacatctactatggatgaattagaaggtaaaaaagtagtgtttgttctttcaccacaatggtttacaaagactggtgtatcacaaggggatttcactaataatttctccaaacaacaagcatatcattttatttttaatgatgagataaatccaggaatgaagaagcaaatcgcgaaacggctattagattataaagttgttcaagaagatgatatattaaaaaattcattagaaggtattgtatataatgatacgaaacataacataaaagcaggtttagttaaaccacttgcttatatgcatcgaaatattttagatcatagagatttatttaactctttatttaaaatcgaaccgatgaaagagaaaacaaatatcggacttcgttcaatttcttgggaagacgcacgtaaacacgcagaacaagaagggaaagcagagtctactacaaatacattcggaattgaaaatccgtattatcataaaaataatctgaagaaaaaactaaaaggtttaaaaaactttagagcaaatgaaacatatgatgaatcaccagaatacgatgatttacaaattattttagatttatttaaagagaaaaatgtcaaaccactctttatttctgtacctgtaaatgggccttggtatgattatactggcttcccgaaagaacgccgtgaagtgtattataaaaaagttcgagagcaggttgagaaagcaggatatccagtagttgatttctctggtcatgaatatgataagtatttcttaaaagatacgattcatttaggctggaaaggttggatttattttgatgaagcagtgcaaaaatttaattctgagaaataaagtatagaaatcggaatggctatgagccgttccgatttttttagtatagaggattttggtgaggacaatttgggaatgcatgtatatcttgaatctgtctataatcataatgtttcattgcgaactgggcttgataaggtattcatacacatataattgatcatcatgcgctgaacataatacaccagaagttccttgcccgttcatgaaagaaatgccgataggacgtccgattaagtattgtattttttgctgccaatgcataggggaatcactcctttttgagataatatacgaaagaaatgattgaatggttgcttatccatataaatgtagatggaaaggtgttatataattcctgaagattaatataaataaaaaaccgctataattctgaatttatagcggcttttttatattcttaagcaagatttttacgcttttttgtccatttttttataacgaagtataaaagtataagtacgacgccaccaattgcgaatgatttcacatacggaccagcaatatcgttaatattttcccaattttcacctagtttttcacctaaataaatgaaaataatagaccaagggataatcgcaagtgctgttagtgtagtgaaacgtagtaaaggcatttttgtaataccagcaggaattgaaatcgcatgacgcactactggaatgaagcgtgctgtaaaaatgacaccagttccgtaacgattaaaccaatcttctgcagcgtctatttgctttttatgtatgaaaatatattttccataacgttctaatatagggcgtccaccatatcgtccaagccaataaataaagatttgggcaataacaccgccaattgtaccgaatacaactgcgcctataaatgagatacttccattgaatactaagtatcctgcataagcaaggacaatttcacttgggataatctcaatcataagtccaagcataatgccccaataacctaatccttcaaaaaacgttaatactgaatgaataaaactacttaacattgttgcaccttctagtttatgaatttttgattataagaaccttttatttaatcgcataaaaggttcaccatatgtagattataccttatttgcataggggattgctatttcaattcttttatgtctctcataagtattatagtaaagtatataagccacgttttcatgaagggttaatgaaaagattattaaaaatttctcataaaaaatagaagcatttctgctcctattttttaaggcttgacatctaagttctgtaaaaataaagttgctgttacgtaacgctttgctaacatttgtacataagcggtatgtacagaaagggtcgcaataataatagcgttacgaattgcttcgcgttgttcgttattaatttgatcgaacttacttgcgattttatcagctttttcttttacgatgttttcaattgtatgaacggtatctgttgcatttaattgtaagcaattcccttgattgagttcttcaaatagagaagagtatgctacatataaatgaacaggattgattaaatcatcacttcgatcagctgggtcatttacaataaggcgtaatagcttacgaatggattcaaaatcaagtgctgtttttaaatcttcgacaataaatagtaaggctgcttgttcaattgaatatttttttcctttttgaggagagccaatcatttcttttatatctcgtttcacccagttttgcatagcagttacagagaaacttgtgttttcaatctgattgccaagcgcaactatttcatttaaagaaaaaccgacatcagtatcgtcaattttaatcagcttttcaaaaataggtgaaagtgcggtagtaataaaagctgtaacgctttgtccgctttcaatatcttttttatgtgactttgcccaagcttcttgtaaaataccgagaggctttttcgtattccatcctcttagtgatagaagaagggtagccatttcgtttcgtgtgagatgaaatgtttccatcttttcacctccaaaataataaaaagttcttatgaacttataatatgttttgtttcatttaaagtcaattctgttttgcttaatttttcctttgtgaccaaactgttgaaagtaaataatacttgcatatttcgacaaaagttcatataataagttcataagaacttttaaaatgttcttaaaaacaaatctatcattctgaatttactagaaagatagatttcacatatatctatataaaaggagaatggatataatatgttgaaaaaacttgtagcagtaatgacagcattcatggttatctttggggctagcagctttatgttcgtagatcatgcagcagcgaaaagttacaaatctggtaaaaaatcatttacaccaagttcaggtcaaaagtcaaaagttgatttaaacaaaaaagactcaaatgtaaattctcaaaaaacgactccagattcaaaaacgaaagcaacaaacacggcaccaaaaagtaataaaggaagctttatgaaaggtttattactaggtggtcttggtggtttactaatgggtagcttatttgcaaatatgggagctcttggttctgtattagcatttatggtaaatatgttagtaatggctggtatcgtaatgttagcagttcgtgcatttaaatacttcaaagaccaacgtaagaagaaggcagatgaagtagcatggaaacaataaaaatttctgaacaagagcttataaatgcgctttgtatatatatcgctgaaaaaagacaagtgggtccagaagaagtattagttgaactcatgtatgatgacgactacggtttctctgcggaagtagaggtaaatggtcgccagcaaattttaattcaagcaaacttaatcgaagctttacgcttattgcttgacagagaatataatgtcaatccattcgcagcgagattacaacttgaattagatgatgaagaaggcatttacgcattagcgaaatttaataactcagatgagtagagaagagagctgttgagaataatctcagcagctctttttagtatgtgcatatgtagatgagtaatcacgccaaatttcattcatctttcgtctaccgatatctaccatcggattaaactgaattgcagatttctgacgaacaaagtgaacgttttgaatggcgtgagataattgttggtcgactatatcacgttttttgcttgcatatttagcaatagatagacctgcaactgttccttgcgccatcgcaatttttccgctttcaatgcctgtaatattgccagctacaaataaaccaggaagaggagtttccattgtttcggaatggagaggaacgtgtccacctaattctgaaatgtaatggaagggacaaccagctacagctgcaagttcggcaagtgggtataatcccccggcaatacaaacaaaatctgcttcatatattttctctgatccattaataacatttcctttagagtcaatattagcaacacgtacaccttcaacttgatctgttccgataatttcaagagctgctttccgaaggtgaagtggcgttccgtttattttcattccgctgtttggatagaatgttaatccagcttttcgaacccaatcatatttcataaagtggctacctattcgcaaaatagcagaaggagcgagatgtgctgcatttaaaagagagtttaaaacttcttcaggttcaccagctttttgacttaactcgcttttctcagggagtacaatatgatccactgtaattcccgctaattgcaattcacttaaaatggcgaaagacaaaatgttagcaccaataataattcctttttttccaacttgcacgcgatgaacatttgtcataacttgagctgctccaattgacatcactcctggaagtgtccagccaggaaggggaatagaatattccgcagctccagtagcaagtagtacgaaaggcgcttctaacgtaccgatattagtatgtacaaaccaattgttttcatctctatctaaattatagaccgaaacaccgcacctgatatgtactgaaagtgattctgcttcttcatgaagtcgcttcgattcttttattccgttccaccattctccagtaggctcttgatgcaactgtcctaacaatctcccgcccggcttcataaattcatcaataacgagcacttttagtccgaaacgagcacaagaaatagaagcagataatcccgctggccctgcaccaataataattacatcactcatcgttttttcaccatctctctcacgatattcggatgctgtttcccgctttcaacaaccatgttttcttctacaacagttaagcatgcgcgtacatttgtttgattatttactgtcatgcggcattcggaacagtgtccgatattacaataaatacctcgcggtgttccgctatcttcatgaactcttactgtcctaattccatttgctaacagggcagcagctatcgtttcatgttcatatgctccgtattgatgaccgttaaattgaaaggtaatacgctcactactttgtaaagtacctaaaatagggtgatgtgtaattctactcatttactttcacctaccgatccaaaagtaactgcacgtattggtggttgatattttaacggtagttcattaagagttacgtcaggattcgcattttcaatcattcgatctatcattattctgcatgtgcgaccaccgcaaaatcccatgccagcacgtgttcttagttttaattctcttgccgagcagttatattcagcaattgtcgattgaagttgcccatatgtaacctcttcacaacgacaaacgattaagttgtttttatttgtcatgtgtattcctcctctagttcggttttcacaaattatatatgcaaaaatcatgccaatatagaggagggagagagggctacctgtaaacgcctgatcggtgcatactgattctttattgaagtccaagtttctttaaacggttatataaagtagcccttgttacaccaagttgttttgcgcattctaatttattcccatttaaaattcgtaaagccctttcaataacttttttctcatgctcatccatctcttcttgtaaagaaaggattgtattattgttgctgagtaatagggaatgggctgtatggttgtctaaagtttcagtcgtatgaaatggtaaatattcttgttttataattccgtctgttgcgaataccacaagccgttcaacaacgtttcgaagttcgcgaatattacctggccaattgtaatgaagcagttcatgcataatgcttgaaggtaagtcacgaattggtctgttatagttgattgaaaaatcgtttaagaaagaataggttaattcaataatatcctcgcgtctttcgcgcagcggtggaatctgcaagctaactacatttaagcggtaatataaatcttctcggaaagttccttttctcatttcttcttgtaaatcacgatttgtagcagcgataatacggaaatcaatattaatttctttttcaccaccaactcggtaatactttcgctcttgcagtacacgtaacagttttacttgcatatcaagtggcatttcacctatttcatcaagaaataaagtaccgccttgcgcgagttcaattttacctttttttcctttactatttgctccagaaaacgccccacgctcgtaaccgaataattcactttcaaataatgcttctggaattgccccgcagttaatcgaaatgaaaggcgccttcgctgcttcacttgcttcatgaattgctttcgcaaatacttcttttccaactccgctttccccaagtattaaaacagttgatttcaccgaacaaacttttctagctaattgtatcgttctttgtataacaggactttttccattcatcgcaaggaatggatcggattcatctttatactttgccacttcttgttctaaacggtgcatttcatgtgacatattaaatagtttttcatttaaagcgacttgatttgtaacatctgtttctgaaacgactgctcctataatttcatcattacaataaactggatttgaattaattaatacgaataaatcggggcgaggctgatggaactgagcgactatgctttttccatcatgtaaagattgtaaaatttccaagtctttataatcaaaaaaacgagtaatcggttgcccaataatctcattatggttgactgaaaatattttttcagcaccatctgtccaagttcgaacgcattctttactatcaattactgtaacagaagagtcagttgtttgtattacagtgtcataaaatgactgtagttcattgtaggacttataaagaaatggaatcatttgctgagaagttatacagcatatcggctcatcgttttcgttaaggatgataacagctaattcataagaaaaagcgtcaattaatgcagtgaatgagtcatctacataaataattgcgcaattatattcttctgtagtagaagggaggtaataaaacctttcgtttattttcttaatgcgatcaaggctacatgtatgattgattaaaacgctttccaaaaattcttgtatagtcggaaatgagaattccataatgtcctcctgttatgtataaaaattttgacagtgataaaaaaataatacacctatttactatgaatttaaaatatttttacaaataaaaatattttttataaaaattgtatatgtacagaattggcacgtcaattgcataaaaagaaagtgagagggctaggaaaggaggagtatattgtgaggcactgcgacgttttaattataggtggtggaataatagggtgttctatcgcttattacacttcaaaatacggaagagacgtaacaatcattgaaaaaggggaatttgtcagcgggacgtcttcacggtgtgatgggaatattttggccattgataaagacccgggatttgatagtcaaatgtctttagtaagtcaaaaattagtaactgatttaagtgaagaattagagcattcatttgaatatagggcaccaggaagtattctcgtatgtgagtcagacgaagagatggaagctgcgcagcaatgggtaaatcggcaacaagaagctggattaccgtttcgaatgcttgataggcaagatataagggaagagtcgcctttttttgctgatgatttattaggcggtttagaatgtgcgacggattcaactgtgaatccatatctccttgctttctcgcttctgtcagaggcacaaaagtttggcgcaaaagcttttaagcagacggaagtaaagagtatggaaatagagacggatggttcatttgttgtagaaactacgaatggaacttttacagcaaaacaagttgtaaatgcagccggtgtgtgggctcctaagattggtcagatgttaaatataaatataccaattgaaccgagaaaagggcatattattgtagcttcaaggcaacaacacgtaggatgccgtaaagtaatggaattcggttatttaatttctaaatttggcggaaaacgaaaagtggatgctttaactgaaaaatacggggttgcgctcgtatttgagcctactgaaagtcaaaatttcttaattggtagtagtcgtgaatttgtaggatttcatacgaggataaataatgaagtcattaaatgtatcgcaaatagagcaattcgcttttatccgaaaatggcagatatgatggtaattcgttcttacgctggtttacgtccgtggacagaagatcatttaccgattatttcacgagtggaacatattccgaattatttcattgccgctggacatgaaggtgatgggattagtcttgcagcagttactggaaaagtaattgaagagttattaaatgaaaaagagacaattattcctattgaaccacttcgtttgagtcgttttacagaaagggtgttaaacggatgaggtcacaaagagtctttacgacgattgatacacacacaggtgggaatccaacgaggacattaattagtggacttccaaagttgattggagagacgatggcagagaagatgttacatatgaaaaaggagtatgattggattcgaaaattgttaatgaatgaaccgcgtggtcatgatgtaatgtcaggagcattattaacagacccatgtcatcctgaggctgatataggtgttatatacatagagacaggtggatatttaccgatgtgtggtcacgatacaatcggtgtatgtacagcgttagttgaatcaggtttaattccggtagttgaaccgattacttctttaaaactagatacaccggctggcttagttgaagtagatattgctgttcaagatggaaaagcaaaagaagtatctttctgtaacataccagcttttttattgaaaaatattactgtacaagtgaaagacattgggactatagaggctgatattgcgtatggagggaatttttatgccattattgatgcgaaatcagtagatctagaattagtaccagaaaatgcatctacaatcatcgataaggcgattcatataagaaacacaattaatgagaagtttgaaatcactcatccagagtattcgtttataagaggattaacacatgttgaattttatacagatcctactcatgaatgtgcgcatgtgaaaaatacagttgttgtaccaccaggcggaatagatcgatctccatgcggtacaggaacatctgcgaagctagctgtattatacgctcagaaagaaatcgaaattggtgaagagttcattcatgagagtatcgttggttctttatttaaaggatatgtcatgaatacgacacatgttgaaaatattgaagctgtcataacgaaaattacgggatcagcttggcttatgggtatgcatagatttttttacaatgaaatggatccacttaaagaaggatttttgctaattccgccgatggaacatgaaacggaggatataaaatgaacattcaaaaaatgtatacagcagtagacgtacatgtaaatggcgaggcatttcgtgtaatgaaagacgtaccatgcaaatactactacagtttggagcaattaaatgaacaattttcaggtgaattagcagaagagatgaagcttttattaaatgaaccacgtggttttatcggtttgaatgggtgtattgtcgttccatctatctataacgaagtggatgcagctgtattattttttaatcatgaaggttcggttccgcttcattatggaggcattgttgcagtaataacgatgttactcgaaagtgggtatttaaaaaagagagagtccaatcaatacaaaattgaaacgttatctggaatatttttagttcatgcgtatgtagagaatgatgaagttatatcggtttcgtttgaaagcaaactatgctatatgattgagggaaatttacaggttggtaatgtaagttattctctcatacaagcagataaagtatatgcagttgtagagaaaggtgcgtattcgccagaaattcgcatggaaaacatttctgaattgaaaagatggggagaagctacactacagactatacaaaaacagtcgctaataaaaaggcttattttagtagatccttcgcaaaaagaaaagaaccatataaaatcgattacatttcatgaagataactttatcgtacattcgccaggttttgtttctactattgtttcctatgttcatgcgttatttaaaaatgattatatggcggataaaccttttaaaaatgaaagtatatttaatagttttataactgtggagaaagtgaagaaggaggaactaggatacattttccgttttgaaagtagagggtttattacagggatgcagacgtttctattagaccctacggatccgtttccggcaggtttcttattaaaataaaatgtgataaggagagataaatatgcaaaaaattaaaggggcatttccagtattaataacaccgatggatgaatttcaggaaattaattgggatggggtaaagcaaaatgtaaattactttatcgaacaaaacgttgcaggtatcatcattaatggaagtacaggagaatttgtaagtttatcaaaagaagaacgatttaaaatggtagcaaccgtgttgaaagaaattgatggccgtattccagttattgttggaactgcagcagagacgacgaaagaaacaattgaatatacgaaacatgcagaagcgcacggagcggattgtgcattaattataaactcttactattgtaaaccgaaggaagaggagatttattttcattttaaagaaatctcaaactctgtaaatataccaattatgttatacaataatccatttacttctggtgttgatatgagtacagagctaatgctccgtattggaaaagagtgtgaaaatgttacacatattaaagaatctagcggagatattcgaaaagcgagagatttagtaagacaaagtgaaggggctttccaagtcttctgtggttctgaagatttagttatggaatcatatttagttggtgcctcgggatgggtttcagtagcaggaaatatcgttcccggtctcgttacaaaaatgtatgagcattttcaaaatggtgaattagaaaaggcgtgggaaataaacgatgctattttaccactttgtgagtttcttgaaggatcagggaaatatgttcaaatcgttaaacgttctatggaattacatgggcaagcgggaggaccttctcgctatccaagactagggttaactgtagaagaagatcaaaagcttcaaacgattttatcaaatattgcagctcatgcagctgtttaaataaggaggagaacataatgttaaagacaaatattgagctgaaaccaaaagtggaagcgtttttaaatgaagaaattaaaatgtttattaatggcgaatttgtttctgctattggcggaaagacgtttgaaacgtacaatccagcaacagaagaggttctagcagtcgtatgtgaagcgcaagaagaggatattgatgctgcagtaaaagcggcaagatctgcatttgaatctggcccgtgggcagaaatggctactgctgaaagagcgcatcttatttataaattagcagatttaattgaagaacatagagaagaattagcgcaactagaagctttagataatggaaagccatatcaagtagcacttgatgatgatatttcagcgactgtagaaaattatcgttattacgcaggatgggctacaaaaattattgggcaaacaatcccgatttcaaaagattacttgaattatacgagacatgaacctgttggtgttgtaggacaaattattccgtggaattttccgcttgttatgtcttcttggaaaatgggagctgcactggcgacaggttgtacgattgtattaaagccagcagagcaaacgcctttatctttactatatacagcgaaactctttaaagaggctggatttccaaacggcgttgtaaactttgtatcaggctttggtcctgaagcaggggctgcaattgtaaatcatcatgacattgataaagttgcttttacaggatctactgttacaggaaagtatattatgcgtcaatctgcagaaatgattaagcatgtaacgttagagcttggcggaaaatcaccaaatatcattttagaagatgcggacttggaagaagcgataaatggtgcattccaaggtattatgtataatcacggtcaaaattgtagcgcaggatcacgtgtatttgttcatcgtaaacattatgaaactgtagtagatgcacttgtgaaaatggcgaacaacgtaaaacttggagcaggtatggagaaaggaacggaaatgggtccactcgtatctaagaaacaacaagagcgtgtgttaaattacattgagcaagggaagaaagaaggtgctacagttgcggctggtggcgaacgtgcgcttgaaaaaggttatttcgttaagccaactatattcacagatgttacagacgatatgacaatcgttaaggaagaaatatttggaccagttgttgtcgtacttccatttgattcgacagaagaagtaattgaacgagcgaacaactcatcctatggccttgctgcgggtgtatggacgcaaaatatcaaaacgggtcatcaagtagcaaataaattaaaagcaggaacagtgtggattaatgattataacttagaaaatgcagctacaccatttggtggatataaacaatctggtattggccgcgaattaggttcatatgcgcttgataattatacagaagtgaaaagtgtttgggtaaatataaagtaatagggcgttttactgataaaaattgagggatgaaataatgaaagatgcggacaactagaaagtttgataatagttgtccgttttttttatatacaaaattgcttttccaaagaatgataagggggatttggatggagaatttagtagaatggttagtagggcaagtgtggagtatcggtttagttgtttttgcattaggggcaggcgtatatttcacgattgcaacacgctttttgcaaatccgttattttaaagagatgattaaactattatttgaaggaaagagttcagagacgggaatatcatcttttcaggcattttgtttagccttatcaggaagagttggaattggtaatattgcaggggtagcgacagcaattgctttcggcggtcctggagctgtattttggatgtgggtaatggctttgttaggggcagcgagcgcgtttgtagaatcaacattatctcaagtatacaaaagtaaagtagggaatgaatatcgcggcggtactccatatttcattgagaaaggtttgaaaatgaaatggtttgcagtcattgtagcagtagttgtaacactttcatatggcgtgttattaccaggtattcaatctagtagtatcgcagttggatttgaaaactctaatggtattagcaaatatataactggtatatttttagtcgtgttactagcagcaattatttttggtggtgtaaagagaattgctggcgtttctcaaatgcttgttccatttatggcaattggttatgtaattgttacatgtatcatattaattgcgaatgtaacggagattccaagtatgtttgctttaattttctctagcgcatttggtgtaaatgaaatgtttggtggaattgttggtgcagctattgcatggggcgtaaaacgcgctgtattttcaaacgttgctggtgtcggagaagcgacgtatagttcggcagctgctgaagtatcgcatcccgcaaaacaaggattagttcaagcgttttccatatatatcgatacaattgtcgtatgtacagcgacagctcttatgattttaataacaggtatgtataatgttatacctgaagggaaaaccgccattgtacaaaacataggaaatgtggaagctggtccaatttatacacaacaagcagttgaaactgtgataacagggtttggtccaatatttatttcaattgcgattttcttttttgcatttacaacgttactcgcttattactatatcgctgaaacgacacttacttatttagatcgtcaactgaagtatggctggttaaaaccagttttgaaatttggatttttaattatggtttacatcggtagcgttgaatcagcgtcgcttttatggaatcttggagatttaggaatcggtagtatggcatggttaaacttaatcgcaatcttacttttaagtaaaaccgcattaaaagtgttaaaagattatgaaacgcagaaaaaagaagggaaagatccagtatttaatcctaaaaatgtggggattgaaggattaacattttgggaagaaagaagtaaagaggttgaaagaaaaagttctagagaaaaagttattgtcgatgataatttaaaattataactcaaattaattgaaaattcttaatttaaaagaaggtatattgcctccatttcatcacatactacaataagtatggataatatgactggagggaataagatggaacatgagcaacatagttcgataaatgatattctacatcattataaagaaggtataggtagttttacaaatcaaattcctgaaatcgctgagacatataatgcgttcacgcaagcttgttttcaagagggttctttaacaaaaagagaaaaacaacttattgcattaggaattagtttagcaacgcaagatgagtattgtacaatttatcatacaaaaggttgtcttgatcaaggatgttcggataaagagattctggaagcatgtggtgtttcagcagcatttgctggcggagctgcgatgagtcaagcggtaactttagtgcaagagtgtttaacagaattgaaaaatcaaaagcattgaataaaaaaacgttttaaactttatgtttaaaacgttttttatgtgaaattaaatttaagtataaaaattatctaggatgggttcaatttatggttatacaataatggagaattttaaatttagtaggaatgagaaataaaaactatttatttagttttaaggttttgtaaaaagcttcaattgtttcatataatcaatagcttttgttttgtttttctgtttagaaacataatgtgcctcattaaaatctctatagtaactgttaactacttcttcagaaagagcaccgtcagatatagctcttttaaccgcgcagtttggttcatttgtatgtgaacagttagaaaatttacatctcatagaaatctcttttatatcttcatagccaaaatcaaaattcctctcaaggtttatcaagtcaaatcctattttactaataagaaatccctccacttttgaaagagtcttttagaaacatacatacaaattttatcgttttcaatttgtattcactttaatattctatatcttcataaatagatttttctacatcaggaagaactgtgtatatactcttaccgattaaagcttctaattctttcttaatcgcataaaaccctttccaatgtaaagatgtatgagatgttgtaccatgacgcaaaccaacagaaattaatcttctttccagcgtagtaaagccatccgcatcagcaagagcgtcacaaagagtaattactttattgtataagtcgtagttacaatgttcatttaatatttcaactaatcggcttctcatatggtcaggaacgagactccattctgctgcgatatctatatgttcatttttgcatgggaatgagtgtgtcacacaaataacagcgtttcctgtataccctaaatcattcatatacatataaccatcataggaatgaatgaccgatttggtaaaacctttgtatcttccgatatcatgcaaaagggcagcgttatatgctatgtcagcatctagcttgtaccctttttttataagttctataattatgttttcagttgcatgagcaacatgtagtgaatgttcaaaccaagggcccgggttttgttcatatgcccattcgagtaattcttttgcgtacattctatctaatatatatttcatatcgttatcctttcacaaaaaatcatatcttaactataaattcctcttattatttcattattccttctttaaaaattgttacaatgaaacaaaagggggaaaagtaatgcgaaatttagtaattgaagaaattaagaaactagaaaatgatatagaagaactttcgaaacttttgaaaatggttgtaaatgatggggcatcaattggttttttgcctccactggaacaaaaagatgcaacaaagtattggcaaacagtattagcgccagaagtgatattgtatgtggctaaaataaacaacgaagtagcagggagtattcaattacaattagttactaagcctaacggaattcatagagctgagatttgcaaattaatgactcatccaaactttagacgaaacggtattggacgatcgcttatgcaaaaagcagaggaacgagcaaagcaagaaaacaggtctcttttagtattagatactagagaaggagatccttccaataaattgtacaaatcactagactaccaagaagttggaacaataccagggtatgcaatttcttcgaatggaaagttagatgctacggttctttattataaaaacatttaagttataatcaaacggggagagtgcttaattattagtaagtgaataataaacgactatttttaacaccgtctatatttttctggcggtgttaaaatagttaattataatctaattaacgcactaaatgaatttgagaaagtttttagagggttcttttagtaatgattctcgtcttataataaatgtagagaagatgactagccgactatagttattttcgctttattatgggaaggggatgaaagaatgaaaaagaatagtttacaaaagatgaagaaagttattttaagtggtggcgtattacttacgggattattaacatttgggttttcagaaaaggcttcagctcatggatatgtagaatcaccagcgagccgatcttatttatgtaagcaaggtgtaaatgtaaattgtggaccaattcaatatgaaccacaaagtgtagaagggataggtggatttccacaactaggaccttctgatggacaaattgcaggggctggtcattttcccgctttagatgttcaaactgtagataggtggaagaaagttacgttaaatggcgggacgaatacattcaagtggaaactaacggctcctcatagtacgaaagagtggaaatattatattacgaaaaaaggttggaatccaaataaacctttgacgcgatcagatttagatttagtgccattctatgtaaaaaatgacgggggagctagaccagggacaacagtaacgcacgaagcaaatgtaccaactgaccgtagtggataccatcttattttagctgtttgggaaattgcagacactggaaatgcgttttatcaagttatagatgtaaaccttttgaataatggcttatcctcaaattttgcttttaacaatgtagtgcaagctcctacactattttaattgaaacatacatttcgatcatctaattcattttagatgattttttttatgaaaatgatgaaaaatatagaagaaagtgcaattatttataaaaaaatatgctttaaatattgtcatatttgcttctttaagatatccttttcatgaagaggtggaaaacatggaaaaagtactagttttcgggcataaaaacccagatacagatgcaatttgttctgcaattgcttatgcagaattgaaaaaagaattaggaatgaatgctgagcctgtacgtttaggcgaaatcagcggtgaaactcaatttgcgttagactattttaaagtagaaggaccgcgttttgttgagacagtagcaagcgaagtggacaacgttattttagttgaccataacgagcgtcaacaaagtgctaacgatatcgaatcagttcgtgtgttagaagttattgaccatcaccgtattgctaactttgaaacaagcgatcctatatactatcgttgtgagccagttggctgtacagctacaatcttaaacaaaatgtacaaagaaaatggcgtaacaattcgtaaagaagttgcaggtttaatgttatctgcaatcatttcagattctttactattcaaatctccaacttgcacagaacaagatgtagcagctgctcgtgaattagcggaaatcgctggtgtagatgcagataactacggcttagaaatgttaaaagctggtgctgacttaagcggaaaaacaatggagcaattaatctctcttgatgctaaagaattccaaatgggtaatgcgaaagttgaaatcgcacaagtaaacgctgttgatacaaacgacgttcttgtacaccaagcggaacttgaaaaagtaatttctgcagtagtagaagaaaaaggtttagacctattcttattcgttgtaactgatatcttaactaacgattctgtcggtcttgcgatcggtaaagcagcaaacgttgttgagaaagcatacaacgtatcactagaaaacaatacagctactttaaaaggtgttgtatctcgtaaaaaacaaatcgtaccagtattaacagaagcattccaagcttaatcgtattgcgtacagatgaacagtaaggacaagtagtcagattggctatttgtccttttttatttataataagcagaaatttttaacttttaaacagtcgcattgtgtatgcttaatgatatggaagtattgaaaagtaaattacaggggctttttgaaaaaatattgcatctgtttcaaaattagagagctggatttcggaggaactgcgtttaaacgctgaaatacagatgttgcgtttaactttttagaagaaaggatataaagttttgattaacgaattaaaataaggatagcgttagctatccttataatcgtttattcgtaagattttttcttgtttatataaaatgtgattatcgtagtaatgaagaaaataggtatcgcatacacttgcccaacaaataacttccagccgacataattatagccttcagatgctgggatgataacggaaataacgcaaacgataaaatagactaatagtgcaggaataatatttttcatttttatgaacctcctttattgttttattaatacatacttgcattataatttagtttcattattttgaagaaaaaatgaaaaattttttatggtattataatatttgcaatgagagtaatctatagtacgcatatggtaaaatgtgtaattttaactttcagaattattatatagtatctcgagaaaaaaatgtacaaaataacgaattttatttaccaaagtaaagggagtagaaatatatatgaaaaggctatgtataattccatgcggaaaaaagaaaatttgggataaacattcagactacggaccgatggaagcaaaagatgtatatattagtccgttcggaaaagcatgtcaggcgtacgcaactatgtttttcgaaaactgggttatattatcagcgaaacatggatttttaagaccaagtgatattgtattagaaaactatgatcttgcatttgattcaaaaagcgatgaggtaataagtatagagcaattacaaaaacagatggtagataaaagtttactacagtttgacgaaatcgtcttactagcagggaagaagcataaaaaagtagtgacaaagttatatccagaagaaatgattacatatccgctagaggggtgtaaaggaattgggtatatgttgcagaggttgaaagaagctgtgaaggaaggggaggaaatataggtgtagtttcagtgattttaaactctatttatttagggagctgaaaagtaaaatagagtttttaggcatcgccgaaagggtgatgcttttttgttcgtgtcgtcattcatgtaaaagtaatttagagaataaatcattcgatttatgaagcgatagcttttttatatcgaaaacaaattgcataacttttagaaaatataggacgtatgggcacagttaagattgtaagtgggaatagcaataagacaagttttgaataagatattaagaaaggagatgttgatgaataatggctagatatagtttgcacggaggacacaatagtattgttcaaggtgctaatttcgggaatcggaaagaacacgttctagataggcaagttaaagatgccgtggcggctaagttaagagccctaggacacacggtttatgacgatacggacgaggtaggggcaactcaatcacaaaatttaaataatatcattcggaatagcaattcccatgctgtggatttagttatttcttttcatcttaatgcaagtgatggaaatggacagggtgttgaggttttatattatgatcagaaagatttggcggctaaaatctcagctcaactagcaaaagatattggatggcgtgatcgaggtgcgaaacaacgtacagatttagcagtattaaatggaacgaaggcaccggctattcttattgaattagggtttattgataatgaatccgacatggcaaaatggaatgttgataaaatcgctaattctattgtatttgctcttacaggacaaactggaggaggtgcagcgaatttgctcaaagtaaaaactggtggtgtagcatttagtaatttacaagatttggctcaagctatggttgatgcgggtattgatggacaaattgtcgttcaaaaagatggcattggttatgctataacgaatggctatccgtccgggaatatcgataaatttacagcttggttagatgcacgtaaatggtactatgagtacgtgagataaaacgaaaattggtttgattaaaaactaaaaattgtcttatttttagttaacaagtatattaagtaactataaaaatatggacaatttatatgtaaattagtacacaaaaccacctgtcagaaaggtggttttatttatcaagctatttgcgggaagtaaaattctcacctcaaaattcggatgaagctaagaaattaggtgggaattacactgctcgtagcctcctactaattatcgtttcactttatatagtttagagttttgtaaatctttacttattaaacccgtaataatattttgttttctcaatacataagccgaattttaaattattacccaataatataatacctctcatactatttattagttgataataacaaaaaaacaagctttgaatataataatgaaaaaggagatgttaaataatgggttatattgtagatatttcgaaatggaatggcgacattaactgggatatcgcagcaccacaattagatttcgtaattgcacgtgtgcaagatggttcaaactatgtagatcctttatataaaaattatgtacaagcaatgaaagcaaggaatattccgtttggtaattatgcgttctgtcgtttcgtttcagtagaggatgcacggatagaagcaagagacttttggaaccgtggtgataaaaatgcaacagtttgggtagctgacgtagaagtaagaacaatgaacgatatgagagcgggtgcacaagcttttattgatgaattacgcagattaggagctaagaaagtcggtttatatattgctcatcatatgtatgctccatttggaatggaaaatgtcaattgtgattttgtatggattcctcgttatggtggtaacaaaccggcgtatccatgtgatatttggcaatacacagagacaggaaatgtggctggtatcggcaagtgtgatttaaataagctgattggaaataagccgttagcttggtttacaaatcaaattgttgagccgataaaaaaacaagaaggggttggaattatagtgaataaatatagcaaagtagttacttatgaatttggtgtaaatttaatttctgacatgattcaaatgatggataagcttggatatacttctaaaataatatctcgtggagataaccaagggcttgtgtatttcgaaacagattatcgtcaagggaacgaactggacaaagcaactgcttggttagatatgaaaggaattaaatatttttatacaaaagagtagtttgcaaaaataagagccgtcatgtgacggtttttatttttatttaatcttttaactctacttataatatggagaaaatagactaataaacaagcctttgtatactttcaaacatagaatatgatgaattctatcaaggaggaagcatatttatgagaaatacttgtcattgtggacattttcaagattgtaataaattttgggatgatttaatgtttgggagatgtagatgtaagcgcaatgattttcacgagtgttgttgcaaagagaaaccgaagtgtgagtgtgaaaaatgtcattgtaaaacaaaagcgaaatgccattgtaggcatgaagaggaagggtattaataataaaaaagagtacgattggtcatctccctgtcaagtagacagaaataaaaagagtattatgccacggccttttcccgatattctatcggggaaaggccgtgaagtttttcttggaatcttagtcagtatggagaatccaattgaaaatgtacatatttattcaagcgttaatgtacatatttaagttagcatttatatttttaagttcaattcccctactcgttccttatcttcatcaccaacccaacaactaaataattcgaaatagtctctatcttccaaataaccttccataaagttaaaagtttttctttcgcttctttttttcctttacattttgccactcgacaagttcaattccccaactagttgaaacctcatatgtgtaatttgtttggaaatgataatcttgtacaatttcaagcatactttcatctgaaaaacacggtccaaaaacaattagattattagaatccggatccgttaacggaatttctacattacagcctatgtaacttgctaaactcattttatactcctccagtattcgtataaaaaatacttcatagtatatttatttacttaaatataaaatccctgcctaaacgaaaaagttttaaatttttatcgtttattaaccatctataactgaaaacatatactatgatgaacgaactcacaaagcataagaaaagagagcatttacaacactctcttttcttacatactctatggaactttacaaaactgaatcaatgatttttattattatattttattacatatacttaggttgtactattatatgtaactctctctctgtatccgcttttttcggatgacgaaaataattaagttcgtactttaacactttatactcaaccatcccgattttaatccctttcgtttcttttaatatagctaataaatcacttacattttcatcatatgactcaaaaattttcgcgccgccctctccttgaaagattactttcatatattctccaccaccttaatttattgatgtggtaaatgacgcgtttaaaacgattcattctttatcctaaaattttcatatgaaaaagaacatcctttccaatcgaatgctcagctttttactaattatccatgttaaatatttattcaaaaacattatatgtattattttttaaattatgttcgatatccattattaaagagtaaatatatgtaataaacttgcataatgaaaaccgtagaatatccactttcgttgaaataattataatccataattttccattgtaattcttaatatttaaatgtaatattgtattgtcttactatctatttataactcacacactaattagaaaaagggaactctatatgagttcccttttctaattatgattacagtcattatttcttttctagaaatttaaatgtatctttaaattctttattattcactttaatatcagcatctttcaataaatcattgactacttgttgtttccatttacctgtcgtatcttgtagtctttgttgttctatatctttacgaattttatcctttacttcatcaaatggcttcaattcttttttatccgtcactttaataatatggtaaccgtaagttgttttaaccggctcacttacttggcctgcatctaatttatacgcagcttcctcaaattctttcactgtttgtccaggggcaaaaccagatatttccccgccctgttcctttgaaccagtatcttctgaatactgttttgctaaggcagcaaaatcttcaccattatttactttctcctttatttctttagccgttttttcatctttcactaaaatgtgacttactttcatttctggtttatagttatctttcacatctttatctgtaactgttgctttaattgctttctcaaatgcaatttctggcttcattttttcttttaattcatcttcatttttcaacccaagttgttctaaagtcgatttaaagttttcacccattttatcttttgcttcttctactttcttttttgcttcctcatctgaaactttatatttatctagcaatgccttacttaacatcatttgatataaagtactttctccatattgttgtcgtaattctttacttaattctttctctgtaacatttcctacttttgatgttactacgttgtctgaggaaccacatgcagataatgctagcatcatgcatgaaataattgttccaataaatattttcttctttttcaattcaaatacctcacttttatcattatgcaaattaactatacacagtcattgtgaaaacagtgtgttttctacatgtaattcatttcatatgagttgactatgtatcatgtattttcatttttaaatataaagagccttcttactatgcatagtaagaaggctctttatataattctcaaaaaaatatagcttctatagttgcttaataattacatgtttttcaggtatccaactattctgtccgatatctaccgcatttcccactctaccccacactcgaaaagatgtcgatccatctatgtttcctttataattcatacattcaggctcttcataataatttactccgtaaccgacaggatattttgaagttgcataaaaccatttcacattaaaatgttttaaatatacccactgcttatcgttccctaaacaaatcatatcttgctcaccgcctccccaataacctgctaagattaaatatggaattttttgagtgagtgtacctgtaaattgaggattcatgaggttttcatataaatttattccatatccatcaggatatttcgaaactgcaataccaatgccatttggttgctgtgtatacactatgttagattgatttgctttgttcgaatttataaaccaagaaagtgacttatttcctactaatcgattcagatcacatttcccaatcccaggaacattccctgaatccgtatattgccacatatcgcatggatatgctggcttattccctccataacgagggatccatacgaaatcagcttcaatattacgtgctccaaatgatagatacgtgtgatgccctacatataatcctactttttccgcacctaaacggcgtaattcatcaataaatgcctgtgtcccgccttgcatatctaccatcgtttgaacttctacgtccgctacccaaaacttagcagattgatcaccacgattccaaaaatcttgtgcctctttctttgcatcagcaatagatataaaacggcaaaaagcataattaccgaatgggatactatgctttttcatttcactaacataattttgatacataaaatccaccgtattagagccatcttgaactctagcaatcactaaatctagctgagatgctgcaatatcccaattgatagttccattccattttgaaatgtctacaatataccccatacattccagctccttttgaatgtcctattcatagctagttttattgtaagcctcagctctctaaaactagctatctataatataagtaaaaagaatctttactgtttttcaaaatatattctctttcagaaatatttctataaactttaacatgtatgccacataaaacattcgaaatataccctactattcatttattatgtaatctcgtcctattaatcatttttacagatattagaaaaaaatccctgttttattaaattataactttcagtatcgatttcctttcaactaaaaaatttcatccctcattttctatatattcttaagtcaaaattactacctctacatgaaatttgagatttagaaaaatttaaattaattgaagtttactccttttaaatcacaattttccaacctgaacactattggtgcataaaaaaagacattttctattaatgaaaatgtctttttacagtttaataaaacaactttggtgctaaatctgtattttgtaattctttattttcactgctcataacacaacttgtggaaaatagaattgggataccacaaatctcatctttcattacatcacgaaatacattggcagcaacacctgtaaacgtttgacataagttagaaatatcgtcattgaaaaactgaatgacttccgcagcgaaaaccggaaagacaacattcggtccgccagggaactgaggctgtaccacaacttgttcaaaataaggattattttctagtgctacttgaaataaatgagctatttcaaatgcatctagtggacaaggaaatggatttacaatttcattctcattattcgttacaataactgtcacacttacattcccaaattgtacaaaagattttaaaagagttactaatgctctcgctttttcgttgcttaacgcatgcactaaaataatataattaccaccaacaggaataagtggcccaactgtaacagttggatcagcacctattgaatttttcaattcattaaaatatgtgatccaaggtggcgaaagctgaacttgtacattcccttccaatattttacactacctccttatacaattcttactagcataatatgtaaaaaactaaaaaatgcatcagttatattaattaaacatcttatttcacattctcaattttccctttacatctttaagcacttttactactatgaaattctttattataagcaaatccactgaaatttcatattatactaatacgactctatatcctttaaattataatactcaatattaggagctgatttcatggaaaaaaaacctatcgtgttcaaaatcccaccaaattcaaaactaaaagttacatttttcggtccttgtaacgaagtaattacaaatgtgtctataattaatcaactatgcgcccctaaatgtcaaactatcacgcaatatccagactttaagaaatatgtaactgaagtacgatcgttatcccgttgttagtccgcataatgcacgattttcacaactttgttacctaaaataactgagaaagaaaataactgcattcctagactaaaattactcattttatgatattccattgataattcattgattttttacacgtttttattaaaagaacatatattatcgtatggagattatccactcataaaacctatctttctttggagcgtacttattatgtatgctctttttttatataaccgtcccccttctaaattgaccaacaatatattaaaattctttatatactcaaggaggtcaaatatgttcaagctgcatccgatactactcatcttaggattgattttgtttttatatagtgtaatcgcctttatgttattcttttcagtgtattagcattacctatacaaagctgtgttcaatatgtaatttctatatagtaaagaaaaaacgtaatgatacgatcttttatgtattccgtctttctgttcaataagaaaactagtaaacttactaacaatgagttttcacaagcatgttacttattattctgtttattatctgaagaagattgaaacctctacaaattaaactacactttacctatttacttatatattttagaaaaacaataatattcccccaccatttggtaaggggattaactaaacctactaaaaaacatttaatgatctgttttatttaattggagaaggaaatcttgctgcttcaaaatgtgccccatcttctaaaggacttaaaaccccatctatactactttgtgcataaatctcaacttcatcccctgcattcaattgaacaatcgtcgaaacacttacgacatttccaaaacttattggaccaaaaaagtcattatcgatagctatcgctgcgtttccattcacacgaatttctacacgcgctctataatttaaagttggatcgtttggaaagaaaccaatcgttccaataatagaatatactcctttagtcttcggcgtaaaaatagatgttgctggattatactcattcgctaaatcaaattgttcattttgaaataacactttcacaaaagtattagcaggaacattttgattcacagtatttctagctctaaatgccgatgctctaacaagattgtccttattatcatgacacttactagtgttcttacaacaatcatgatgcttctttttatactccttacaatacttacagtagtaataacaagacatactaattcccctttcaaacttattactacatattatgtaagattgatttataaggtttggactagctatttttcttattcataagggcgctattaatctgcacccttatttatataaaccacttcattccttactagttataagttgtatatagttccatatggaatagtaagaaaagaacttccgtacggtgtaacatgatgtactggataaaaatactctacggatgagtaatatggttgtactccttgctgctgcatttgttgttgcatttgtaatgcttgctgaatagcttggactgtactttgtgctccactatacgttatagacgtaccatacgctggtcgcatgccagcttcagaattaatatatgaataaaacataattttcaactcacttccgtataatttgttacacattatattatgattctttatttcattgggtactataatgctagtccgctcgcttatattcaaatgacaaaataaaacagtagctgctagactactttgaattcttcttattaccaaatgaaatgatatacatattctcctgttacacgctcatcgattccagcaaccctaacgaacctaagtaaatccgccccttgaagaaaatatatcgacatcgtaaccggtacttgtgaccacatgaattgaaaaagctcattcaccctctgattcgtcgtaatgattaaatcatttacaggtccatgattccatgcagaggtttgaactgaagtgaaagaaaggtctttcccattaatcactattcttgccacgctttgagttatgtccacaataatcccctccaacattacaaaaattggaccttttttagttcatattattataaatattcttgactgtaataaatgtttaaggcaaatccctaataaagtgaaactttaatcagtgggggtcttactgcccgttaatgcgggatacaatttttttattcatatccctcaattcccattacaaccatataatttctaacctgattcaatttttgtaaaagttgaaccagcaaatgtaaattccataaaagtattagaaaaattaaactttacttttgaaggtactctgagaaaaagcgaaaaatcagctggaaagcttatcgatttaaatatttattcgaaattaataagcgattaattttagtcactctgcccatacttaatcaaagtgtcggcttctttaatttctgtataaaattcaaaaatttgacacaatcctggaaaaagcttataaagaaaagtgaggttccgttattttcacacttagtagcgcagccatgttacatacaattttataagtgtgaacgaactacaaaactaaaaaacaaataataagtttgcaacatgtttgcaaatgcgaattttgcatataaattcgtgtgatattgaaaggagttttacttatgaaagaaattaaaacagaacaagaattcaaagacatcatcgcaagcgaggagccagtagttgttaagttctttactacatggtgcccagattgcgtacgtatggacaactttatcggagatgtaatggaagagttcaataaatttgaatggtattctattaataaagatgagtttccaagtatcgctgaagagtatcaagtaatgggtattccaagtttacttgtataccaaaacggtgagaagctaggccacttacatagtgctaacgcaaaaacagaagagcaagttactgagtttttagaagcatactaagatgaaagccctctggaaaatattttccagagggctttcatctgttttcataattatcttttgacgtttttcctcgtttaatgaattacaccttgtcatgataagaataatatgtagtaagaaaagtattcgtttcttgatccatctcccctcctatctctttagtaaatagactctaattaggtttacaccctgactttgtacttttcaacatatttttccttcacgaaactttgttatccccttcttaaaaagctataaaacgtcaacaatgtttgtatagacccacacgactttcgtttgatactctatttatagaaagaaattcctttaaagaaaggtgagtgattaaaatggatactctttctcataaagaagctgataaaggcgctattgtcagcattatggcctacatatttttatcctctatgaaaatcatcatcagttatattaccctctctagcgcattacgtgctgacggtttaaataacttaacggatatcggtgcttctttagcgatattaattggtctaaaaatatctcgtaaacctcgtgacccagatcatccgtatgggcattcgcgggccgaacaaatcgcatcacttgttgcgtccttcattatggcaacagtcggattagaagttgttattagtgccattcaatctttcttaaatccgaaacaagcagcgcctaatatactcgctgcatgggttgctttattttctgctgtcgttatgtactgcgtgtatttgtatacgaaaaaaattgcagcacgaacaaaaagtaaatcattagaagccgctgcaaaggataatttatcagatgcactcgtaagtattggtaccgtagtaggtattgtcggttctcagttccaaatgcctattttagaccctattgccgctttaattgtcggtcttattatttgtaaaactgcatgggagattttcgtagaatcttctcatatgcttacagatggaattgatcctgataaaatggaagaatacgctgatgctattgagcatattggcggtgtggaaaacattgtagatattagagcacgtatgtatgggaatcaaacgtacgttgatattacaattgaagtagatgctcgcatggatgttggagaaagtcactgtattaccgacaacatcgaagctatgcttcgcaaaaagtttggaatttaccatgcacacattcatgttgagccaatgaaaaaagaacctattatgacataggttctttttttatgaacgttttatggaatataacacataaaacgagccagctaccaccagctgcccatcctgctaatatgtcagatggatagtgcacgccaagatatattcggctaactgaaatagataatacaacaaagcttgctataagaataattaacaattttttatgcaacgaaatacgttcttcagtaattgtgacgtatgcaataaatcctaaaaaagcagtagcattcatcgtatgaccgctcggaaaactatatccagttgcagtaacaagctgcgtgacatcaggtcttgctcgttcgtaccatagtttaagcatactgtttaaataacgagatccgtagtaattaattgttagaagtaacgcactaagcaacttttttctaacgagaaaatacattacaagaataatgagtaatggaaaatatattcttttggaaccgataaaagacacccaagtaaaataggtcgtcaaataatcgtttcgaaagctttgaataaaatgtgcgactatattgtcaaagttctcaatacaagcggtatgatacgaaagtgataatacgacaaaacaaatgagtaacgtaaaacttagcaagtataaatgtcgatatcgtttcacatacataacctcactatgcaaaaaaaatggagcggttgttttagttttcctctccatttcttttttatgcatagtttattaaaaaatataattattaattttttgcttcatctcagggatatcttctcttgttacagtgaagcgaataaccttctcatcaagatcaagtgcctcagcgaataaaccagctaatccacgtgattttctatctacttccataattatttctaatcggtcgtatgcacgtggcaaaattaataattctaattcatctaatctgccgtagtactctccagaaaccggaataaactcaaattcttgtgcgaatggaacttgtttacgtaatcgatgcggtaattcttcacattctatatgacgtgctttaaaccctaattcatttacactatctaaaacactacttaataatgcattaggtaacacttgaacgtagtcgcggtcacttgggtctatactacgtttaatatcaagacctgtatgaatccaaaccgttttcataccaagtgtaagtggtgcttcaattggcattggaaaagaaaatggaatgtcaactgtttcatttggttctacagaaaaaggttcggttaagcgtactcgctctaaatcatatgttgctgttacttttttatcatccacttctcgtacatacgacgtcgataatgttaagtaaatgctttcaatttgttggctaactgaacctccagttatatgaacctttccaactatttcttccccaacaatatactcatctttttcaagaacagtatctacctttgcacttccaataccaacgcttgctaaaaacttttgaaacatggagtctccatcctttctaaagcagaagctacatcttgttttaaatcttgtacattctcatagtacggcgtttttatttgtaacattcgcataagcatttcacgattataattttccaaagttaattcttcgtaccatggtttttcctgtttttcattagattcatatcctgcatataataaaaataatgagaaatgaccgagcgcataaaagtcgctacgaaattgaacttctcgcatcaaagcttgttcaccttcgtaagttgtagctcgctcatcatcctcacctttccatttagctaatccaaaatcaataatactaatttgattttctttcattaatatgtttggaatgcgtaaatctcggtgaataatgccttcactatgaaacaccgatacaatttctaatatttcatataaaatttcaaaaacttcacgttctgtatatacatacccatctatgaaaatataatcttcaaaatttttaccagacatgtactccatcacaaagaagctctttttctcccatatgaaatgatcatatagactaggaattgcatgatgatttaatgtttgtaaaatcattttctcttgttcaaatgattttctaccagactcatatctttgtttactttgtcttaattgttttaagactttatatctatttatctgcaaatcattaacgacatatgtaaccccataactgcccattccaattactgattcaattttataatgctctgcaacaattgtattttttcgcagtggtctatcaaataatgctagtacacgacgccatttcatcagctacttgaaaagaagctacggcttttacgttttcttttataatgttgatgtccataaccagatgaacgtcgtttataatcgctacttgaatacgagcgccctctacgacgataatcactacttgaatacgaacgatattttttctttcctaataaagaatcaataatttttttgaacattccttcacctcttgagtaaaatttccttttcattatatcaataattattgactatacttgtgacaggtttgtaaagagtaaaaaacgacgagttatgcccgtcgttactttcattcatcctcttcatcaaaaacttcatcaatcatgcatttctctaataaatactcaaatgtaatatctgcgagatcttcaatttcttctcgttttgggacgtaccctctttcaattagttgctcataaaaaaactccgcaatctcttccgtatcaatcacgacttcaatttccttcatgagcatcactcctttatttctgttttatgaaaaaatctcaaaattatgtatatgagattagaaaaatagattttatttttttataggtcataagctttggacgagatgcatacgattgtagtacaagctattcaaagggggaaataataatggaaaatcaatatgaagtaagacaaacaaaagaagagttcatgcatgaagatcaatgggcagactctcttataaagtggctttttatttttttaatagttgtaggcataccttatactgcatatgttgttgttcaatttattctctctttctagttaactattttttctctgtcaatttaactaaataattatgaacaacatccattacaattttatattcttcatctttaaatgtatcgaacaataattgataatcgttataaatgtcaagtaatccatcaatgatttcttgacgattcgtcttaacactcacttttttcgagttgttaattgactttaactttcctaaatctaatttattcatacctgctttatcttgtttcattttcttcaaaattgcatttgccgtttgagcattggcgagtaacgttaaatctgattcatccgcttctaaccattcaccatccgtaatccgtgacaattcataaattgtatcttcccatgcgtcattcttatatctccatacttctgtacgaaaaccaacaatacggaaaacatctttatcatatccagttacttgcacaagatcaccaaacgtgaaattataatttaattcaatccactccgtatcgccctttttcatatcttgctctgtaacgtgctgcaatgtttgctctacgtaaaatccatcgtgattattgacttcgtatacataaactccatctaaaaccttcatatttgtgattttcccaacggttccatatagcgtaatcacgactatgtcccctacgttgtatttaggttgtttttttcttgccatctctatctctcctttttttgacgtcgtgattttgatatcagtatatgcaacctacataaaaacgcttatcacagaagcttatattcataaattttttcaataaaaaatataatcttataaaatttacattacacttaaacaaaagctagtaactagactagcttcaaatcaacaaatttcataataaaaaaacatacagaatacttcactttaaataaagtaatgtattctgtatgttttcaaatagtttttatctatcttgtatgtataaatcccaggcttcatcaaatatagacatactttctagcattccgctcaactctaagtatgaactaatttcatcatagtcttcagattgcttcggaaaacttaaatcatcatacatcgcctctgctaaatctgaaatttcatttctaaataaagctgcacgatgcttcatcatataatggtaaaatgtctttttcaaaaatattccctacctttctaacttgggtacattatacaaggcaaaaaagaaaaaaaccagcataaaagctggttaaaagtcgaaataatttctttttaatagacgcggtcttcccattaattcttcatatgttagttgttttggtaaatctttcgtgtaaattaagaataattgatcttcaatttcttttactgtatggtctgattgatagtccatcccacacgaggaacaagaaatacatggtgtctcttggatttcaatggctttcgtaccatctggtaattcccaatatacagtattcaagctttctttcgcttctgtactgtcacaccacatacaattcatactgcatcaccctcagtttttttgtcgttttcttctaacttagccatttgtgcttgatattttttatcttttaattgatcgcgcttatcacgtttatcttttaaagatgcatgagtatcattatcttcgtagtctttacgacggttcatacgctgtaagtcgtctggaacgaggttaaatttcttatcgctcataagacctgcgataccaacatctgaacgtttttcttcgtagttcggataaatctctttaaagtatccttccgctcttcctggaatatagctctctggctctggatacgtcgtaataacaccttcaaagttacgaagtacaactttatctgcactttgtgagattaaatagtttggttgaagtgcaattttaccgcctccgcctggcgcatcaacaacgaatgtcggaacagcataaccagatgtgtgtccacgtaaaccttcaataatttcaagacctttagatactggtgcacggaagtgaccgataccttcagataagtcacattgataaatgtagtatggacgtacacggatttttactaagtcatgcataagttttttcataattggaacgctgtcgttaataccagctaaaattactgcttggtttccgactggaacaccagcattcgctaacatttcacatgcctttttcgattcttcagtaatttcaatagatgtattgaaatgtgtatttaaccatactggatggtattttttaataatgttacataagttttctgtaatacgttgtgggaatactactggtgctctcgttccgatacgaataatctcaacatgcggaacctctcgtaaattttttaatacatattctaaaattttatcattaattagaagtccgtcaccaccggagattaatacatctcgtacttgtggcgtttcacgaatataagcaattgcatcatctaattgtttctttggtacacccattccaatttgtccactaaaacgacgacgtgtacagtaacgacaatacatagaacattgatttgttactaagaatagtacacggtccggataacgatgtgttagccctggaactggtgaatcttcgtcttcgtgaagtgggtcttctaaatcatattttgttttatataactcttccgaaatcggtactgattgcatccgaatcggacagcgtggatcatcaggattcattagccaagcatagtacggtgtaatgtttaacgggatcgttttcgttgaaattttaacgccttcttcttcttcaggtgttaagttaatcacttttcttaagtcatctaacgttttgatcgtattcgttaattgccaaacccaatcattccattgctcttcagtaacatctttccataattcgatatccttccagtgacgatttggtttgtatacatcatgtaacattgctattccccctttttatacgctcatcctttatataagcaatagttatgccaactttacattgttgataagtaaatgtgcggagaaccctattacataagcgaaaaaatatttttaagcgttgtatgaaatcaatacttaacatcatattcattactttttatatatgtaaacgctcttttattggtgcaaacacacaaaaaccgccgattattcggcggttttgtcgtacttgctcagtttatattgaagcgtttgacgagggatacccaacatttttgcggcttgtaatatattcccttccgtttcaatcaacgcttgatctattaattctttttctgtttgatgaagtgcttctctaagtggcattatacccttcttcttcgaaaacttctctttccgaaatgtacgtggtaaacaattggctgtcaatgtattcccttctgcaataataacagcatgttcaatcgtatgttttaactcccggacatttccaggccactgataagcttgcagtctatctttcgcttcctcatcaatttgaagtacaacttttttataacttttattatattctttcaaaaaataagatgctaataatagtacatcctcagttctttcacgaagcggtgggatatataatgaaaatacgtttaagcgataatataaatcagtgcgaattttattctctcgtaaacatatttctggaggctggttcattgcggtaataacacgaacatctacttttctcgtcttattatcaccaattcttctaatgactccatcttctaacactcgtaacatttttgcctgcaaatcaagaggcattgaattcagttcatctaaaaataatgtaccaccatcaacaagttcaaatagcccagctctttcaatcgctcccgtatagcttccttttgtcgttccaaacaataaactttctaatagcgactctggtaaagctgcacagttttgtgcaataaatggcttgttttttcttttagaagcttcatgaattgcttgtacgaacagttcttttcctgttcctgtttcaccatatattaaaacattcgcgtctgttggtgctactttttgtgctaactctttcgtctgtttaaaccgcgtatcatttgtcactatcgtctcaaatgcagcgtgctttttaatcactttttttctagatgatcgctttattttcgactgtaagtcaacaattgtgtcagtaagtttttgaattgtagagtaatcctttgcaatttcaacagccccagcaatattcccatctataaaaataggtaacgtcgtatttactgtacaaacatcttcaccatttaaattttgataatgttgtacctgatgtacgataggtttttttgtatctagtactttcatcaatgtactcgtttcccttgataaagacgggaacgcttctaacagatgtttccctaacactttttcaatcttggatccatcgtgttttgcagctacagaattataaaatattgtaattccattttcatctacagcgtgtatagcctcatcaatactgcccaaaatcgcttcaatgacttcttgtgtcgaaactgctagcaatgtcatcccccctcttgccgaaaatccagcaattatatgccgaattttcggcacacctatgtgcgattgtaagcatgacgattccgttctataattttgaccaattttatattttcattagataactcgaaactctaattagtacaactttttcgaacacccagctccacctaactgttttgctttacagccaaattttgagacggaagttttactgctttcgaataactagatagatctttcacccatatattcatatcttccaacttatcgaaaatgtagcaattattcgccagtcttcctgtatacgtatagcctaattgatgaaaggcagcattcattccgaaagaaagcgatcgagcaattgtataggagcagaaaatagatctttctcgaagctcttcctctaatttaattagtaaacttttcataaatccatgtttacgatattcaggtaaagtagcacaattcgttaattctgcatttccttcctttatgttcatttctgcagatgctgtactaataatttccccctcaaattcatacacgtagtaaattgtatcgtcttctttcatcgtctgtaatacataacttgcttcatttaaaggtgtcggatacacttcaaatacttttccgaagacagttgctaattcttctgcatcttcttcagtcgcttttctcagcaaaaatttctctggaactactttttcttttatttcttttccttttacaccgcttaatatagtatcttcctcagtccaatgcatactatttcgtctttcatcattattatatttcacaaaaaagtatgcatcgtgtccttgaaaataatgaggtatcgttgcttccaacacaaaaccgaaagagagccatgttgaaacatgctctccctttcctttaataatacatttagtgaaagaatgtttctctgctagttcgtcaattgtctgtataatactttcaacatttcctgtatagtgatctacccggatacgtttattaaaataatctaaaacgccttctactgtataacaattcgtctgttctctaaaagattcatagtatttcattttttcacctcacaccaatctagtaatgtacatgcaataatttttgcggcagctatcattttatcaacttctatatattcgtttggatagtgtgctactttcgtctctcctggaccaaatactattgttggtacgtttgcaatttgtgtaaataaacctccatcagtcccccacggagatgcttcaataattggttcgttcccttcgatttcaacaaagttatgatgaagtgttgtaatgagttcatgattttcttctaattcaccaggaacccatctcgctccaaaccattctacttctaccggattttcaacaaaccaattgtccacatcatttaattcaacaatccaattctcaaactcttcttttgccgcctctatagtctcattcggcgcaacaccgcatcttccttctaaaattaattcatcgggaacagaacttggccaactccctccttcaattttgccaatgttaattggaattggaattggaattcctttaaataacggatctgtaattcgactatttcttttctcctctagctttcttacatgttctataacaaacatgcttttttcaattgcactaaccccttcatagcgcgttccaccgtgtgcagctttcccttttacacgtagacgaaaccacatggaaccttgttgtttcgggaaaaacttcatattagtaggctctggaataatgacaccatctgctttatatcctcgtaatatagttgctaatgtccctgctccaccactttcctcttctattacactttgaaaatagatgtctccttttaattcaatactagattcaatgatcgcttccatcgcaagcataagtgcgacatttccgcccttcatatccgtcgttccacggccatatatacgatttcctattttctcaccgctataagggtgatgttcccactgattcacatccccttctggaactacatcaatatgcccatttaatatcatagatttcccgtcgccacttccttttaaagttgctacaatatttgggctatctgaaaaacttgtacggggtgatacaaaataaggatgatctttcattttagaaaaggagggctcccatatatcgagatctaaacctaattcacgtaatttttcaatcacaattgcctgcgcaccgctttcatcaccagatacgctcttttcttgaattaatcgttttaaaaatttcacactttcctcttcatggctctcaatataatcacaaacttgcttttttaattgctccatatattacatctcccttcattcaattactagtaagttagaactaatttgaaaatcagcttctgtatgtcgttttacatcttctactgtgtatgggctcattaattcttgtaatataagtccactcggagttacctccatgactgccatatcagtaataattaaatctacacatttctttgaagttaatggcaatgtacactctgaaacaatttttgcatttccgtacttatcaacatgattcatcacaacaacgacccgcttcgctttttgtgctaaatccattgctccaccaatacctggaacacgttttccaggtacaatccagtttgctaaatcgccattttcacttacttgtaatgaaccaagaatcgttatgtctagcaaaccttttcgaatcatcccaaacgctgtgcagctatcgaaataactcgctcctgttataagagaagttggtaaacctgctgcattacacaaattttcgtcttcattccctttacttggcgttggtcccatgcccacgattccattttccgcatgaaacataacatttatatcgtcaggcaaatgatttggtacaagcgatggtatgccaatacctaaatttacaatcataccattttgtatttctttcgccgcacgcctagcaatcttatccctcacttctacgcccatacccatttccagttcactccttccgacggtacaatataatttacgaaaacacctggaacgacaatttcctctggatctaaacttccaagcgggactatttcttccgcttctacaattgttatatccccagccatcgctacgtgaggattcatatttcgtgcacttttgtcaaatacaaggttaccaaacggatctgccttttttgcatatacaattgaaacttcagcagttaatgctgtttcaactaagtaggtcttaccattcatttcaactgttcgttttccctcttccacaatcgtatcaacaccaacatcaactaaaacaccaccaagaccaacgccaccagcgcgaatgcgctctgctaatgttccctgcggagaaaactcaatttgtaatcttccctcgtttagttgccttcctgcatttggattggagccaatgtgagaagtaattattgatttaactctttcatttgtaacaagacgaccgatacctacatcaggaaatccagtgtcatttccaattaaatttaaatttgtaacgcctttttctaaaattgcctgtattaaagatggaggggatccaatccctccaaatcccccaaacatcaatgtcatatcatcatggaacaaagaaattacttcctcaatttcttttaatttaccgaatgtatttgtaatagttgtcatgcgatactatgccctcctttttgcatcatctcttccacacttttagagaaaattgaaagtaattcatctaactcggaatatgtagttgtcattggcggtgctacaagcagtgcactatcttcttttcctgcttgccctgaaactgcttggtataaaagcagaccatttttagctgcaactgaaataagctctgacgcttttgtaaacggttgcaattctactccgattagcaacccttttccgcgcacatcagcaatgattgtcgattgttgctgaactttctgtaagccttttattaaatactctcccttttctgctgttttttcaggaagattatgtttctccatatattcaataacagctaaagccgttgctgcagacaatggatttgcacttaacgtatgaccgctcattactgaacgtgatccacgtaatattggttccataacacgatcacttacaactgtcgctgccatcggtgtatatcccgctcctaaccctttaccaagtgtcataatatccggctctacgccccaatgctccatcgcaaaccatgctccagtacgaccaagcccagtcattacttcatccgcaataaataaaatatcgtaatggtcgcaaatctctttaatgactttataatagtctttcggcggaacaaccgcgcctccagctgctccgataatcggctcagcaataaaagcagcaatatgctctgcaccaattctttcaattgatctttctagttcagtcgcacatgccagctgacaagttggatataccttttgaacaggacatctgaaacaatatggagctggtatagtcggataatcttccaaaatagatacgaaacgttgtctacgtagtggatgcccagacattgataaagcacccatcgtaataccgtgataactcatccatcttgataaaattttatgtttcccttgaatacctcgctcttgaaaatgctgaattgcaattttcatagctgtttcattcgcttccgtaccactatttacaaaaaaactccagttcaaatctcctacacttaaatcacttaacttcttcgctaatttttcagctggttcactcgtaaactgtgatctataaacgaaagcaatctcctcagcttgctttttaataacgtctgcaatctcctttacgccatgcccaatacctgccgtaattgctcctgacgaaccatcaaaatatttattgccattttgatcatacaaataaacaccttttccatgtgaaatcattggatacggctgaccaacaagtggtttaattaagtaatcgcgcatagcgctcccccatttctccaatttgtatatatatatgaagaaaattgacgtttctttcataaaaaagaatcctctgcaaaagcagtgaatttatcaaaaaactattataaaatatacaaatgagtgcttaaaaaattttataaaacagaaaattcagaactaaaaaaccgaagaccaacccttttctatacgcccaaatgaccctcctttttatatgaaatgactgcatcaccaaatgtttttatagcataatgccagctgtccttaaataccgacattctgtacacttcgacggaactcccgttaaactccttcctattatcctactttaaattgcatattttaaaacaaatttcgacacccaccttactaatcaattcagattcctattcattatgtaaacttttcatttttaaactataaaaaaagaaccgattaaccacactaatcagttcgtcatgacgctctcttatgggttaatactgtcaattgctaaaataaatagaaaaatgaagtttacaaattcatcctacagtctataacacaaaaccttttcataacttcattcacaattactatcgggatatccctatcccgaagtggcactcctttcctcagattcaaagtatctttcctttataatttatgtaggacaattatcactttgtatgtgtatttgcctataattaaaaaaatccctagttttctagcgatttttggacatgtattcaatatgttaattgaaatgcactttcaatttggcatttattttactttcgtacagtcatatgtactgctttactctgtgaaattctcgtaagcaccagcacctctttatgaaaacatatttgttgtcactttttaattttccctttataaaatcattttttttgcataaccgctttcttgcttcgcatatagttttaatgatgacaaaggaggaatgttcatgtctcaatctgaaatcgaaaaatatggacaagaagttacgcaatacgaacagctcgcacgttactatcagtttcgtaaccctaaaaaatatatagaattatatatgaaatattacgatgcactatcaaaacttgtacaggcgtatgaaacaagagactcacaagaagctgctttaccatcacatataagaatttttcatgccgatccaaatataccggcggttgacattttagtaaacggacaaaaggttattaaaaatatttcatttaagcaattcagcccttatttatcattagtgcaaggtaaataccgtatagatattgttcctgtcggaaatgaaactccaatcttttcagcgttggtaccaataatgggaaatcatacttatactcttgctgcaataaatagtgataatcacctacaattacaacctatacttgataatacacatttaccagctggtcaagcaaaaatacgctttgcacatttctctccagatacccctgttgtaaatgtagatttaaaagatggagatcatttatttgaaaatgcactctttaaacaaataaccgattttttgcaagttagccctggtacagcagatattgaaatttcactcgcagataataaaaacgttttattgactataccgaaattcaatgttgaaccaaatgttatttatacaatttcaatagtaggttattcaactaaagatcctaaattagaagccgttatactcacaaattaaaacagtctacaccattcatttggtgtagactgtttatttttgaaatgcaatttgaaattctgtccaatcgttatctgatcgacacataatggatccattatgtttttccacaatttgtttacatacaaacaatccaataccagttcctaactttttagtagttacaaatggttcaaaaatcgtttctacattttcagctggaatcattggtccattattttttatcacaattcgaatagcttgatcttcttcaaatacatcaatgataatttttcgttcttctttcattgattcaagagcatcaattgaattcattaatatgtttaaaaatacttgtctcacttcactccgataaccaacaagcggaattggatacggtaaattcttttcaatcaaaacattcgcattgaccaaactcggatataagaattgtataatgtcttgaaacaagtcattaagccaaaaccgttccgattcattccacatttctttttttgatacgagtaaaaattgcgaaatacgaaaatttaattgatctaattcatgcgaaataatatctaaatacgataaactcggatgatctgcctttaataatttgacaaaccccataatggaagtaagcggattacgaaattcatgtacaaaactagctgacatttgtcctaaaatcgtcagtctttctttatgtgtttcgttaatatattgctgtttttcctctaaattcttcgatataatttccgagtattttaaaacggtataataaattaatttgtcaaaacaagtatgtatttttgccataattggtttcaattcacgagcgctaacatctaattcacacatcgcttcgaaaagttcatttcttcccacgtttgcgttataaacaaaatctccaatattcgcatctgctccagcacgttcaatagcaattttctcacataacggttgaagataatttatatctttatcttccatagtaagttcgataattaactctagtaaatcctctccattttgaactacttctagtttaaatggatctttttcggaaattatcattttgtttttccagttctctacgaattggtgcctattgtttttcaagtgtgaacaaaatatttctttaatatccttatcgattggaaaaacctccattccctccatttccatacgacgaataccctttatattttgaatattaacacaaaaaatacgattcgttaatagatttttgtcacattttgttaatttctgttgataaaattattttttctttcttatttaactaattgtatgcaaatcccctttttccttcacatattttcattatttccgtagtcaaaacgactttttttgcatcatttttaattcttgcgtacaatagaaaatgaaaggtgtgaaaaatatggtaaataaaaatgtggaagattatctccaagaaggcatttacggccaaaagcaaaacaaaccagaagaacgtaatatgtatttaactacattacgtgagcgtgtggaaatcgctttaacgatcggtcaagtaatgcaaagtaatgtatactctgaagtggcgggtagcatgcgcccttctcaatcattacaactcctcctaaatggtggcattgcttacccacatttatcaaaatacattaaattagcaaacgaaaaaaatgttccttttacaattgttcaaaataaagatacaaaaacaccaatcggtttagtattaactcatgctactgctgtagataaagaacaaatttatgtagaagatactattttcaaacaagaaatgaagtaaaagttacacttaattaaatagttactagaagcgtaaaaaacgagtatggaatcgtaaacatttcctactcgttttttagtgcaagttttaagtttttctactttattttttaatacatactaatttcatttctgtcatttcttctattgcatatttaattccttcacgccccgtgccactttctttcacgccaccataaggcatatgatctactctgaacgttggaatatcattaatcatgacaccaccaacctctagctcatcaattgcacgcattgctttaaataaattatttgtaaatactcctgcctgtaagccgtaacgcgaattatttacttgctcaatcgcttcatcaaattctttaaatgtatttactgtcatgagtggaccgaatacttcttggcactgcacagatacatgatttggaacattttttaatacagtcggttcaaaaattcgtgcatcccgcttcttaccaccgcataaaacagttgctccttccttaattgcttcttgaacccacatatcaattcgctctacatctctttttgaaattaaagctgatacatccgtttcctcaagcagtggatcaccaacaacaactgattccatcgctttctttagcttcgaaagaaattcatgcattttcgtttcatgtacaaaaacacgttgtactgaaatacaaacttgtccattattaacaaatgctccccattttacacgttcaattatttcatctgttaactctacatcttcatcaatgataacagcagcatttgagcctagttctaacgtaactcgttttagcccagccttttgttttattccgattccaacttttggacttccggtaaaagtaatagaagcaacgtaatcatttttgacgattgcctcaccaaccgtggagccaggaccagaaatgatatttaaagctccatttggcaatcctgcctcttcaaataactcaactaatgcataagatgataatggcgtttgatcagctggctttaatacaactgtatttccggcagcgattgctggtccaactttatgcgctactaaatttaatgggaaattaaatggtgtaatagcccctataaccccaatcggctttcggattgtatatgcaatacgcccatctgcaccaggtgcggcgtctaatggcaatgtctcaccatatatacgcttcgcttcttcagctgcaaatttgtatgtttgaacagtacgatctacttctccccttgcagcacgtattggttttgcagcttcttttgcaataatctctgcaaattcttctcttctttcatccattttttgtgcaactttctctaaaatagtcgcacgatcatatgcagataatgtattcatttttgtcattgcattttttgcagcggtaacagcctcttttacatcttcttccgtgccttgtgcaatttccgctaatgtttcttcagaatatggtgcatataatggtttatacgtgtttacagatttccaatctccatttatatataaatgctttttcatacttcttctccttccaaatatatgtatacaacaatacttcacctagtgaaaggtttgacttatgtcattgtatcatagcccttatccctcaaaaaacattatgctcaaaaaaactctgctatatagcagagtttacgagctaatttgctcttgtaacgaaatttgtttttcatcttctaaaataacaatcgattctactatctttgtaacttctaatctttttatataatgtccatctaattctttcacacaaaacttataattttcaatttcaatggaatcctcttcagcaatctctatattcttcgttaaaatccaaccaccgattgtatcaacaccatcatcatcaatccctaaaccaaataacatattcacttcactaacaagtacttttccctctagtatcgtcttcgtttcactaaccttttgaatttctggctgctcatccgtatcaaactcatcctgaatatctccaacaatttcttccagaatatcttcaacagtaacaagtccagatgttccaccatattcatctatcaatatagcaatatgtgttctttctttttgcatttttaaaaacaaatcatgaattggaatagaatcgataactaaaataattggtctcatatattgctctactgtcttcttattaacagctttatgttgtacaaattcagtaaaaatatctttaaaattcacaaaacctattacgtggtctttgtcgccatcaacaactggataccttgtatatttttcacgagacattttttgcaaagcttcttcagcaggcatctctttacttataatattcatttcagttcgaggtaccattatttcttttgcaatgcgatcatcaaattcaaaaattttattcacatatttatattcagattgattaatctcaccatttttataactttctgaaactaacaaccgtaattcttcttctgaatgaacctcatcatgtcccttcggcggtttcagccctagcagcttcgtaatgattcgagctgaaccatttaatagccaaatgaatgggaatgcaatacgataaaagaaaattaacggcttagaaacaagtaaactcacttgttcagatttttgaattgcaaatgtttttggggccaattcacctattacaacatgtaaaaaagtaattaacaaaaacactaaaattacagcaaaaatgtctgctagttgagtagagatattccaatttgcaaaaagcgtatcaaacatttgctttaacgcaggtttaccaaaccacccaattcctaaagctgtaacagtaattcccagctgacaagcagataaatattcgtctaagtttgtaatgactgttttgaccgatgttgcacgattatttccttctgcaattaaatagtcaattcgtgaacttctcactttaacaattgcaaattctgctgcaacgaaaaatgccgttaaagcaattaaaacaatcactatacttatactatatatgtccaaatacttttccttacttactttgtaagcaaggaagccacctcctacttaattttattcaagtgaagtaagcattctaatactctaacaaaattctacattagcaaccacctttttatatattatatgcatacataaaaaagatatttatcattatgataatctaattcatttacaatcgtcaaattattctaaatgttacgataaaacatttttatttaaacgaactattcttctcaactcaatttcgtgaaaaaacactttctttgccgattccacacttcttttgtcgcactagaagggaacttacttcatagctcgaaatcattcaacaggatatatataggagggattattttggaatataaaacaccatttatcgcaaagaaattaggtgttagcccaaaggctgttgtccggatcgcacaacaattaaatcttacgatagagaaaaacaaatatggccactttattttcacacaagaggatgtcgatcaaatgttagaacaccatcgatttcaaatagagcaatctcaaaattctcaatctactcaaaaggcttcctcaaatgaagttgaggaattaaaaactcaagttaatacaattgttcaaaacatattacccaatgattttgagcaattagctgatcaattaaacactattacgagaagacttgatcgaatggaagaacaaatgcaagataaggcaaatgatgtcgtcacgtaccaacttttacaacaccgtcgtgaaatggaggaaatgttagagcgaattcaaaaattagaagctgccctaacgaaagaagaacccatttatattactcctgattcaaaaccaacatatgaacgagaaaagaaaccgaagcgccgcaaaatgatttttagtatatttggattataatttttagacccttattaaaataataagggtcttttttaatgaagagttatatcctatacaaatattattctctttattatacatattcacttcgctttatttcgttaacataatatttttactgtattctgcaattaatgcctgtgcatgagcattcccttgaatcacatcacgaaattcttttaaagaatacaaatgcgtaaccccttttcgagcatgaattcttactggtacaccttgtaaagtatcatgaaactgaaatggattatctattggctcaattggaaaaccaagtgtaagtaaatacatatacattctttttgttactgctgcaatgtaccattcagcttttgtttctaacgcatgtataaataaaatagctgttagccttttgaaatgtcctctcccacgagacgttttcgaaatacttaacttgcctatttcatatacattcttcaaatcttttactaaatcatttttagaaaacggatagaaaaactcagaatttgattgttcaggtatcgtatacttaatacattctactgtaccaataggatgttcatcttctattaataaaaatcgtgatggatttaaattacgttctacgaacattaagtttctttcttcacaaaaatctccccatagttgctcgaacccaaaatgttcttcctttgtttgaacacgctggaacatatttaaccgcctttcccatcgtcgctctgtttttgataacgctttcactatctatcatataagaacaaatcttcgtatgcaactaaaaatatttatgacttattatattctgcaaaatgaattagattccaatttaatcgacttttatcccgcgctcacattccttttaataacacatttgtagcacttttcaaatctaaattacattatgtttctttccatacagcatataattcttcttaatctaaagaaatcctttatgaaaaaggatttcttttacttcttaatgctttttaaccatttttcaaaaatttgtatcatcccatgttttccagctaatttctcttccccttgtttcgtcttatatggatataactgcaagaaaacaccgcatccagactcaatttttttactatgcatatggcttcctggatatacacaaatgacttcataaattgaccttcgataatagactcgctttccatcctgttcttctacatactttatagaccagtacttatacatttgctcagttgctttcgtatttccgacgtgctgaaaaatattgtacattggactatacttcacttcaataataatagaagatttatatacgtatttcccatcttcttttacataacagtctaagcgaatatctggcttcttcgtatcctcaccattgtaaaaattactacctttacttaatgcaataagaggatgtgtttcaattaagtcattaaatgcaacatgcacctttatatcatctcgttctaaaactactgtcgttccatcttgtaatccatctacataaaaatgttcttgtatttgttcacggatagagtttctagcttcaaaaccaatttgctctaaaattgaaataacgataaaaaaagcgtaatattcatacactaaaaacgttggcttataaacaaataataacgatggagattgatccgtatattgcgggagtacttctaaatgatgtagtaattgttgatgtggtatcggtaaatcatgtaagttcatgttacttgtttcagtaacttccctccaaaacgaagaatgcattaacatttgaaagtattgtacattttcatgcacaatatgcgccaatattttatattcttgtattttcattgagctctttcgtaaatcggcttcttttagtaaatgtatatttttatatttttgcttctctctatcagttaccgatccattacgctcaattgtttgtataatcgtttttacggcttgaaactcttctgattttttctttttttctctttctaagatttcaattgtttgacgtaaaaaactttttgcttcaattaaataatgataaaattgcatcgctttatatttaagaaatgcattttccttactatttttttgttccataaacttacgattataatatttggcataaggttttcgttctgctactatagttccttttcttgttggccttcgctcttttccttcccatttatattcatttataaattttgagcttgattctattttcttaaagatttgctttatcattttcattttttggggtaactttctaagtaacactaaataagaagaatcctcaatatcgctaagtgcagagaaggtctttttatagtaacctctatccaaaatcaactcatttaaaattgacttcacatagtcttgaatcatttcaaattgatcatcaaaaaagtttttcggtacgatttgaaatgcgccataatacgttgtatcttctatacgcacttcaaaatggtataaaccacagcgccatggataaaagaattctgttttcccatgttcatatattaatactctttgttttttttcatttatttcatattgagcctcttttatatttttctgtccctcatatactttattccatataaaagtaatattcattggaatttcataattgtactgcaatcttattggttttaattcttgtactttataaatacattgaactaatgctgtagtagatgtacaaagacgatttaataaaatataatctcctttcccctcatttccaatgattaactttaatacaaaagggagcgtttcattcgtatcaacgatttttgtttcgtaacgcccttcattttgcatatccatacagctccagttctctacgtttttctcgtatatatgctaaagagtgttcaaatgtagatactctgtttgcaagtgcagattgcaaaagaggtactaaggtcgcccccctttttgcttcttcagaaagtaaaggcccaaccatcatttcggtccctctgattttcgtcaatacacgctgctttatttgtaaatcaaacccctcttctctactgatcatataggtatggttattttggaacggtatgttttgcaaataagtcgcaattgcatttgcacatcggaaagaaattcccttagacgcgtcatgtgatgacaatacgacatgcaacttatctaatagctctaattcttcttcagaaaacacttcaatcatcgctttatttctcatccaatttatccgaaattctcccgctgttactttcaaaggtggatgtaatacgactttcccctgttccatgtccatctcacaaaacggaattttctgtaacgttattaggttcgttcgatctaataatcgatcagagagctcttttgttgtttcatcaaaattcacagtacctacaaatataatattttctccaatttcaattgttgatggaattgaattctctatgtcctgtacaccctcatacaagtttaaaatacgattttttgtttcaagttcaagaacagatagaaacggagtaaaccaatgctcaatatgagacatgttcatttcatcaaaaacgattatatacagttgatttggattttctttcgccttcattaacgtcctaactaacttcgtttcactttcaataaaagtaccatttggatgaaggtaaccaagtaaatcatgtggttcttgatacgatggcgaaatcggaatccaaaccaactcttccccatactgtaaccctaatgcttctgcataagtttgcacaaaacgtgatttcccaatgcccggtataccaccaagaatcgttaacatatttgtttttacacttatatgaaaattataaatatccgtttcatccaaatataaccctttattatgcaccatactttgtacatactgtaaaaaagacgattcacgctcatcccattcccattcatctttttgtacttttatatcctctacttcaactagcttaccttcttcatgcattcgtttttttaattgctcatacacataatcacttacaaaatataattgatcttctaccgctatttctacatacttcggccagtcactgcagtttatatatttacattcacgtttctgttcaaaataggcgattgagctaattgatgactttagggatatgtttccgtaaagtcttccatcgtgccacaataattcgggaggctcaaagtctttcggaaattttggcataagaaatgataaataaccgttgctaagttttcgttctaaagattctctttttttattatttgtaactttaggtgccggaatcattttatagctgcttgctatttctttcggttcttctgtacatattaactccacgtatacatttcctctttcataataaagacgaaacattactagttgcttttctaatttcctcttctttaattccgaaaagattttttcattctttttattgctacataacccttcaaatacatatggttcatttgtaaattgttcctgtaaagtgaatggtattggcgataagcattgtacaaagaaattctctccactcttctctttctcagcttttgtaaatttccctaaaaatctcatatagtacattcgttttataaaacttggctgaagagctttatgtaatttcaccttagtcaccttcttttttcatactattcttagtgtatgaaagaaacgaaaaactagaaataaaaaacctgacgttatccgccaggttcaaaataaaaacttatattaatgagaaggaaatgcttttttctcctgtaaaattgcattatgagcaattttcattttcgcaagtacgtaacgtaatcgatcttcagcgttttcatctttacttatttgtaattccgccaaattttcaacagaacttgctaaattttcaatgactcctcttagttcaggatgatgattaaaaaaagattcttgcactaatactttccttaactcactagctaaatcaattattctagacaactgttctttttcttccattctcatccctcctgaatatcttatgtagtaaatattctctaaacaaagaaaaaagccctttaaatgaaaaggactttttacatttttatatttccagttaataacatatatattgatgtgatagccgcaacaataattgcccacatcacatacttctctacacctacaaagcaacggttcccttgttcttttcttgcaaatgtgtaaacaataattccaattccatacacaattgaaacgagtagtaaattctttaaaccagctgcataaagaagccatacagagtaaatagaagcaattaaagctaacgctccgttttttaatttagcgtcttttagctcgtttgtaatgactaatttaaattggaataacgctgataataaatatggtaataaaattgatgttgaggcaatgaaatacataatttgatatgttgattccgaaaacaaaacgatgataaatatagtttgggcaacaccatttgaaatccataatgccatgtgcggtgtttgctttttatttgttttcgtaaagactttcggaaatacgccatcttttcctgccacatgagaaatttcagaaacaagtaaaaaccaaccaattaatgtaccgacaagtgaagcaactaatccgatgttaatcgcaactgcaccccatggaccaacaacgtgctctaatacatgccccattgaaggggtttctaacacagaaagttcgcctcttgtcatagctcccattgacaggacagaaattaaaatataaatggacattactaaaataagtcccaatactgttgcctttccaacatctcgactattcttcgctcttccagataatacaactgctccttcaactccaatgaaaacccaaagtgttacaagcattgtatttttcacttgaccaagtatagcggaaagtgagatcgttccttccccccaaaaatcatgtgtaaatgtgtcccagcgaaaggctgttaccattacaacaataaataaaacgattggaactaacttccctattgttgcgatcacattcataatagaagcttcacgaattccaaataaaattaaaaaatgaagtgtccataataaaagtgatgccccaacgatagacgcaacattatttcctcctttgaaaattggaaagaaataacctaatgtactaaacagtaacataattgttgcgacattacctaagattcctgctagccaatatccccaagcactattaaatccaatatattcaccgaaaccagcacgtgcataactataaattccaccttcaagttccggtttttgtcttgctaacgtttgatatacgagcgcaagtggaatcattcccatcgctgtaatacaccagccaattattattgcaccactgtttgctcctactgctaaatcatgcggtaaactaaaaacaccgccaccaaccattgttccaactactaatgcgattaatggaaaaaatcctaacttcttttctatttgtaccaccccatctgtcattctaggtgttatgttcgttcaactattaaagtcacctttttctctaatagacgtttctcttatattttttcaggaaaacattacttattctaaaagaaaatgagcaaaaatggaatacttttttgaaaaaatgtataagtatgcacaaaaaaaccgctcattttgtaatgaacggccatttcaaacatataaatttgtatatttcttgtaaatttaacgaagtaacttctctttttgtaaaaattgttttgcgacttcttcactacttttaccatttacgttaacttcataattcatttttcgcatttcttcatctgtaatctttccagataatttatttaataccttttcaagttcaggatatttctgtaacgtttcttttcttaataatggtgctccttgataaggtgggaataaccctttatcatcttttagcactttcagtccgtattgctccaattcactatctgttgaatatgcatcaattacgttaacatctccagattcaattgcgctataacgcagcttcggctccatcgttttaacattcgagaacttatagttatataatttttgcattcctttataaccatcttcacgatcagcaaattccaatgtaaatcctactttggcttcctgcgcaacattccctaaatcagaaattgtatttatattcttttgatctgctatttttttcggcatagctagtgcatatgtattgttatactccattggcttcaacataatcatattatatttcttttccattccaatgcgagcctgctcatatacttcatcacgatttgtactctttggttcttctttcacgaaagtagataaagctgttcctgaaaattctgggtatatatctacttctcctgatttcaacgcttcaaatacaaatgctgttttcccaagacctggttttaattgtacgtgtaaatctgtatcttgttcaataagctgcttatacatttgaattaaaatttcaggttctgatccaagtttgcccgcaataacaatatctttcttttctgtactccaaagaaatggagaagcaatcattatacaaacaatacatatcgtcaatataacacgcttagaagagcgtttcggtcgttcaagtatgcgaagtactatatcaaagaataaagcgagtaacgcggctggtacggcccctaaaatgataagcgcatgatcatttcgatctatacctaatagtataagcttaccgagcccacctgcaccaatgagagctgctaatgtagccgttccaacaattaataccatcgctgtacgaataccagccataatgataggcaatgcaagaggaagttctaccttccacaatcttctccaactattcatccccatagctttcgcggcttctattaaagattcatctaattcccttattcctgtatatgtatttcgtaaaataggtaatagtgcatacacaactaatgcgataatcgctggaagttttccgattcctactaatggaattaatagtccgagtaatgcaagtgatggcactgtctgcattactgcagaagttcctattataaattcagccattcgttcttttcttgttaataagatgccaagtggcaccgctataattactgcaaaaaataatgaaataagcgatatttgtaaatgctcacttaatgcagttagtaattctatttttcgttcttggaacgtttgtataaaattagtcactgtttagcctctttccttcatttgttcaacaatgtaattgacaatgtgacgacttgttaacgctccaatatattgaccgtttttttcaactggaacgacctcctcatcacgcacacgaactaacgcttcttgtaaagaagaatgtaatgatagcgcctgcccttctaattgcacactttgatcaagtggcaatacatctgctatacttttcccctcataccaagttcgcccacgatttccaatgaattcctctacaaattcatttttcggattatgtataattccttctggtgtatctagttgaacaacttttccttctttcataatacaaatgcgatctccaagtgataatgcttcttgcatatcatgtgttacgaatacgattgttttttgaatctttttttgcaactgtacaatatccttctgaagctgttccctacttaatggatctaacgcactaaatggttcatccataagaatgattttcgggtttgcagctaatgctcgcacgacaccgacacgttgtttttgtcctcctgacaattcatcaggcatacgatttcgataaatatccggatctaatccaaccatatgtaacaagtcatcgacgcgtgctttaatttcttttttgctccattgcctcatttcaggaacaactgcaatattttcagcaattgtcatatgaggaaacaaagcaatctgttgcaacacgtatcctatatcccaacgtaattcgtttatattatattgttgaatatcttttccatcgattaaaatcgatccttcagtcgtttcgattaaacgattaatcatcttcattgtcgttgttttcccgcaaccactcggaccgatgagaacaaaaaattctccctttttaatttctaaatgcaatgaatccactgctttcgtgccatcttcatacgattttgacacatgattaaattgaatcacaaatacaactcctttactgttgtttcctttattttgatggaatatggcattcatttcaaatgatacgcttttaaattaaaaaagagctcacatttgagctctaacggtcgaacaatattgttttcattatagcagcatattcgcgaacatacatttttctcttagaacgaattggtgtttcagcagctagtgcctccatcttcatgcctaaacgctttgcaattattttcgttcgatataaatgatacgtattacttacaactaccgcatgtttcacattatataaatccatactaaactttaagttttcatacgtatttgtagattgatcttctattaaaatacgactctcatctataccgtgtaccattaaatagtttctcatgctgtgagcttccggtatatcttcatcttctccttgaccacctgaaacaattactttcgcttcaggatgggaaaataaatactccaacgctacatccaaacgattttgaagagataaagacggtctatctccaaataactttgcacccagtataagaacgtacggagagtgatagctcaacttttcacgagcaactttgttcattctaaacgtcatataaatgatatatagtggcggtaataataaaatgataagaaagatccatttgttcataaataagtttgcactccctttctttttattatacagaaaaagaaagggcggcagaagtgttttttaaacgattgatttattagaaacattcgccgctactttacgttgtgatagtacataataaatagcgattcctaatgagaagatcaatatgcagcttaatacgtaaaatggaagcattactccggctttagatacacccgctgtaaacagcattaataatacaattcgtattccagtaccaattaggcgaaataagctgtctacacgtcccattacttcgtttggaatttcctccatcatcaatacatttctcgccactcttgtacccgcatttccaactgcttgaaaaattgcaagtccatataagaaaattacggaaggttcaataatcattgcggtaattgaaattacataaatggacatcgtcataacgattgaaacttctgtttttacatatttcattatgagtggaatacagattcctgcaacaaccgctccgacaccgtacatcatcccctctattgcgtatacagaggcattggctttaagtatatccgaaatataaactggtattaaataatttgccatcataacacctataaacggcatataagtggccagtaagaaccaaaagagcttaggacgttttttcataaagtgaattccttcaaacaattgcttcttaaatgttatttttcttttcacttcttttttctttacgtatggtatacataagaaaagaaaaaatgctccagcaaaagttaacatgtctactaacaaaatccacttcaaagatacaatttcaattaagaagctcgcggccgctccagaaataacttgtgttaactgtccttgtatttccatcgttccacttaaacttttataatgttctgcttgaaatatctcttggttgaacgcaaatattgtaggataaaataataaatagtagaatgatccggctatataaataagaatatagtgaatagaatgataaggttgcccagcaaatccccatataaccattattccgattacggctattccgattccttcgttacatagcaataaagattttcttgaaaaacgatcaatactttgcccaatgaatggtgttaataaaaacataatgagggttgcaatgatagaaacataaccaaatgttgtctctcctccactctctttaattaacagccaaggaatcgttatcataacaatcccggaaccaatagcagatagactattggctcctagaatgtaatacaagcgagaatcatgataaagtgaggacatatcattccactcctagttgttttttcacctctttatatacgctcatatatgctttcaattctttaactacatcatgaattaatggttttgcatcttccccaagttcaccatcttgcacatgtaatccatcaagcacaacttgttttggaattgcatttgcataaacacctctagcgaccgttcgcatgctgtttaatgcatttattccacctttaccgccaccagcaaccgctaacaacgcaactggtttatgaataaattcactactacttaagtaatctaaagagtttttcagcgcaccgctcatcgcattatgatattctggtgtacataatacaaccccatccgcagctttcactaacgtttttaatttttttactgcctctaaatcacgttgcgactcttctccattgtataaaggtaactcctcaattgctaaatcatataattccccttcaaattgatccgcaatatattttgccaccacgcgagttctaccaaattttcttggtgtaccgttaataacgactagtttcatgattatttctcccctttgttttcaagttctacttatatattatcagaaatttctatacaaaacacaatataaagagttaacttgtttcataaaatagtatgataaacaaaaaagaactcatactttcgtatgagtttcgtacaattactttgattcatctctcatgctcaatgtacctaaactttcatttgcttcaaaatgattatatgctttttccgctaatcttttccgttcttctggtaattctatatatttcattacgttttcaattattttttcgtacggagtaaatacaattcctggccactctacctcatcttctggattactattttcggaaataataaatttcttattcgcaactgcataagacacgcgaggtgtttcaagaattcctgataagtaaaaatgaatatttaatataattttagctctagcaatcaattcatttctaacaattccccacgcattatttttaaaaactatatttaaattcggggcaatcgcttttagatgatcaaaaatagcttgtcgcctcggattaagagcacctataaacagaatatcaatatcttcaataatctcatcttcaaacgcatctttttttatttccaaagttggagcatagttcatttctacatgttttatttcttttcctacccctttttgttgaagccattctatattttgtttactataatcccaaatcactctatcttttaataatattaaataaaggggatgcgcatatggacttccttcgtatagctgttctaaattataaataattgcatctttcggaagaagattcgggttatatgcgtatgtatgtgctccaaaaacaactgtattctttgcattttccagtattgtttctgatataattactgtatttccctcctgctccaaccgccactttaaagctcgcgcaacatctatgaaactaccgtatgtctttgggcatataaaaagacaataatcatattctttattcaaataaacttccattaatcttaaattatttttatataaatctacatctggatgtttaagtaccaactcatttgcatgttttcttgctactttatataatccagcataataagcagcgatgcatcttcttaattcgattctttcccggtcctcatctaatacatccatatttaaaagaagatttgcgatacaatacgcttttaaatgatcacgatcataataatagtctagtagtggcatcaattcttcatacgtatttccatgcaccgattctcctagttcaatcgcccatctcattaattccatgattactccactactcctttaaccgaaaatgtatttaataaaatttcgcattattctctactatatttgctatatgaaatggaatcttttcttttatcgattccaaatacttttgcgacaccgcccctaaatgttttttatgaggtatatagaaagcactaatagaaatttcatagtcaaataagtaatcatacacatgataatctacaaatagtagatcatcctttggaaaaggaatttccttcccttgcagagcatacatcaaagcaatattgttttgagatcgtaatcgatacaaccttgcaagttggtataatggttcagcccgggttggtctatattcccaagctttttgaaaataaaaaacagctaatgctaaatattgctcttcttgccctttaacagtttctttttcatcagcatctgtcacttcattttgtttatttgctgaacgatttgctaactgctcataacaaaatcctattcgcaataacgaatagaatacctcttcaacccatcctcctgcttccactcgttttttataccatttaattgaattctcaaattgacttaaatgaaaataagtctgagctaaataaaataaatatcttatatgcaaatctggcgttgtttctgggtcgtttattccttgtaacaacaacctctcatctctttcaaatttatcagctttgctcccgccatctccgggatcattcacgacaagagtctctaaccgagctaccctcgtattgtaattcgctccaacttttgaacgatctatatcccaatactcatgagtaacaccgacagatttccatggtaaagaagctttcaaaagacgtgtaagccaatatttaatatgaacatcatattgtaatgtaagataatgatcttccgttaagctcgttttatcgaaattcggatcaacctctaaaatcatatccgcatctaatattaataaataatctgcttctgggtatgttttttgcgctaacgaaacagctaagcttctgttataaccaaagtttttaaacggctcatgatgaaccgtcccaggtatctcattttccttacaccaattttcaataatttcaggcgtattatccgtcgatccagtatcacaaatagaaacaaagtctacaattgattttgttgcatttaaacatctttccataattctagactcatttttgacgatcatacaaagacataactttttttctttctttacagacttcacttgctcatttcccatttaaccacctcatattttattaacacgctcttctcatatgtaacaacatttcttagctatactgatgacataagcacccttttactatttatgaaaacttcattttatttattcttacttttatgttgagatatatttcatgcagcgctttatatttgatacaatcaatacaaaaaaacataatgcgggaatccgtacatttcaaagtctaagaggaggttatattttgttggattacatttggctagatgacaaatcaccaattttagaacaactaccaagcacctttaaatctgcagctatattgctacacccttttgtccaaatgcctttaggatgggaaaagtctgtgagaaaaagaccatatgagcacatctatcctagcgctgaagaaatcattcataatgggaaatccgtttcttggaaggaaatgatgtcttatagtggattacattcatacgcagaattagcaatggccctgttgacttccattggtgcttatacagaagaatataaaagagaggatttagccgaaaagctatattcaaacttaaaaaaagatctttattatccaacagaagattatacgtctatatttttattacataaattacttaaactcctcggttctaaaggtgcaaaaaatttatatttctctgaaccaattcttgatacaaacggattattagaggtaaataatactactccattagatatttgggacattagcaataatgagttaattattactggcgaagataatgagtatgcgtttatgagtatattcgattcctttacaaccttattattagctaaagaagaaaatatagaatatattgttcattcaatgaacgttgaagctgtcatttgtgacaaaaaaacgatgattgattggtatttttaaattagtaatttcttaaactataaaaaagaaacttgcgcttatgcacaagtttcttttcaaaaacatccttattttttcacaacttcatgtccaccgaactgattacgtagtgctgaaactacttttccatggaatgtatcatcttcctgagaacgatagcgcataaataatgacatagcgattactggtgctgcagcttgaagttcaagtgcagtttcaacagtccattttccttctcctgaagagttcattacacctttaatgccatctagtttcggatcttctgcaaatgctttttcagttaagtccattaaccaaccacggataactgatccattcgcccatacttttgcaacatcttcataattgaaatcaaagtcactcttatctagtacttcaaatccttcagcgattgcttgcatcatgccgtactcaataccgttatgaaccatttttaagaaatgaccactaccaacacggccagcataagaatagccattttctactgctaaatctttaaataaaggttctaattggtcgtaaatttctttttctccaccaaccattaagcaagcaccgtatctagctccttctacaccgcctgatgtaccgatatctacataatgtaatccgaagctttttgcttcttcagcacggcgtaacgtatctttatagaatgaatttccgccttcaataacgatatcaccttcatctaataacggataaacatcttttagtactgactctacaacttctcctgcaggcaccattacccaaattgtacgaggagcttctagttcagcgatcatttcttttaatgtatgacgtgcagtaattcctagttttcctgccttttcaacaagctctttatttacatcgtatacaactacttcatgcttgtcttcatataagtgttcagctaatgggaatcccatttttcctaatccaattaaacctagtttcatattaatcaatctcctattctatacaaatatatttaatatcgaaattagcccaagtgctactacagataatatagtctccattgcagtccatgttaataatgtttctttcacagtcattccgaaatactctttaatcatccaaaatcctgaatcattcacgtgtgataaaattaatgaccctgcaccagttgcaagtgctaataattcaacatttacacctggtgtgcttgctgcaatcggcgcaacaataccagctgctgtcatcatagaaacagttgccgatccagttgcaattcgaataagtgccgcaattccccaccctaataatatcggtgaaatatgtgattctttcgccatatctgcaattgtcgttccaattccagaatctaataatactttattaaatgcaccgcctgcaccaatcactaacaatatgtttgcaataggtccaaggcaatcatttgtaaattgtaacactttatcttttgagaaaccttttgcatatccaagactaaagaaagagtaaatggttgcaattaataaagccacaatcggatctccaataaagtgtaatacttgtgctagttgactcgttttatttaatgcaacttctgctattgatgcaccaagcataagaaatactggaagtaaaattgtaaacaatgtattcccaaagcttggaagctcttttttattatctttttcaataaattgctccgctatatctaatggtacttccttatgtatacgagcaccaatccatttcccgtaaagtggacctgaaataattgcagttggaagtccgacaattaatgcatataaaattgtcttccctacatctgctttaaaaataccaactgccgccattgccgctggatgcggcggcactagtccgtgcacaacggatagtcctgctactagcgggataccgattgtaataagtgatacccctgtttctaatgcaattgtaaatactaacggaattaatagtacaaatccaacttggaaaaataccggaatccctactaaaaatgcaacgaacatcatcgcccagtgaactcgtttcttcccaaaacgattaattaatgtgttagcgatacgttcagcaccaccagattcggccatcatttttccaagcatcgttcctagtgctaaaactattgctaaaaatcctaacgtattaccaagtcctagtttaatagaatcaataattcctggatcttttggtgaagttccaattaaaggcattcccattgctaatcctacaccaattgctgttaaaattaatgcgacaaatggatgccattttactaccgtaataagtaaaagtagtatgacaactgccgctagtacgatcccaactaccatttctcccaatccccctattttttacgttggaaagcagctatacaatcaaattcttctttcaagcgattgtaaagtcgttcatacatataaaacatttctaaatatatagccgtattttctttattcggtacatgatgatggacaatatcaatccaatcctttacctcttcaagagaatcaatttttcctacagcatacaaagcaactgccgctgccccaagcgcagatgcttcatgactttcaggtacaagcaattcttttcccatcatatcggacaacatttgtctccaaaatgcagattttgcaaaccctcctgaaactcgtatttcagtaagtggccctgtacaatccctgattgcgagtgctactgaatatacactcatacaaacaccttccatcactgcacgtataaaatgttctcgcttatgttgaagattgattccaaagaatgtaccacgagcatttgcattccagtaaggtgcgcgttctccagataagaaaggtaagaacaatagcccatccgctccagctggtacgctttctgcatatttaattaataaatcataaggatcaatgccgagctttcttgctacttcttgctctggactaccaaattcatcacgtaaccatctcagtaatattccgccgttattcgttggaccaccgattacccagtgctcatctgttaatgcgtaacaaaacgttctccctttctcatctgtatttatatttgatgagattgttcgaaccgcaccactcgttccaatcgtaattgcagccgcacccggtgatatcgcaccaactcctacatttgcaagaaccccatcacttgctccgatgacaattggtgtttctgcacttatccccatcttctgtgctaattctggcttcatacctgataaaatatatgtagttggtacaggggttgataatttttctggtgacatatgtaacatagttaaaacatctttatcccagtttaatgtttctaaattaaataaccccgtagcagaagcaatcgaataatcaactacgtagcgtgaaaataattggtaaatcacatactctttaatggaaatgaatttataggcacttgtatataactctggttcctcttctttcatccataacaatttagaaagtggtgacatcggatgaatcggtgtacctgtacgtctataaatttcatgcccattcatttgttgtaataatttttctgattgcttcgtacttcgattatctgcccaaatgatagaacgcgttaatggcgcaccattttcatctactgcaattaatgcgtgcatagctgtactaataccgattgaagaaatatcttctggtaatacattacctttttcaatggcaacgcttacacttttgtatacagcggcacatattacatcaggatcttgctcagcccatcctacattcggttgaataattgggtaatcgattgcatgtgatgcaatgacttttcctttttctgtgaacacaaccgtttttgtacttgtggtaccgatatcaatcccgattactctcccccttgtttccatgcgaatcttcccttcatttctagcaaaatacgatttagtaaaccgtttacatgaattagtatataaaatattttttcatttatcaagttgtaaaaagaaattttttttcatatcaaaaaataaatcccctcattccatttcacttatatactacatttagcttttccatggggtaaaattacgttatattcgttacgcaatacactctttcctctcattaacaacacatacatagtcctccatacgttctacttatttgcttgaagaaagagttgaaaagcaatattcatttttagcggtcacgtaacatcaccatccagccaagaaaagtaactaaccgcagaatgagaattctgtgcattttgctcttatttattgttttaggttcactagtcttttatcttgataaacatagagcgtggcccccctactatcacttttttaccttgtaaatatatcttgcatactataaaaccgaaaagtatttttatttttcagaaaaataaaaacaataacacgaaatttattgtataatgttgtaaaaagatgtcggagggatttaatgttaaataaaatatctcaattcacaattaagctttcgtcaattcttttatcactcttactattattaaatttaccttatttatttatcactcaacaaggatttacctttcaaccaatttatttttttaatcagaccgttactatgttaaaacaggtttttccccctgaatcattagtgattataggatcagacccgaagcttggccatttcaaaaaaacaccattatttccaactgttttagaaccttacctatattcatttactatattatttttagccttttttcttgctctctttttatcatctagcatggcatttttttattttttagcaaaagattatataaaaaaatggataaaccgaattgtgttcatattagaagctgtccctgatatgatgatgatgatttgtttgcaaatatttttcatatgggtacttcagaaatttggggaatctcctgtcactattatttcttttaatgaaaatcgagcttatttactccctattttatcattagctgtcttacctacattacaaatgtttcggatgatggtgttatacataaaagaagagcaaggaaaacattacgtagaggttgcatatggaaaaggcctttcatcaagttatatactatgcattcatttattcaaaaatatatctatccacttcttccaccatttaaaaacgatttttgttttcttactttctaatttattcattttagaatttgtttttaatatggaaggcattattcaatttttatttaataaggcgtttgtttcacctccagctgcatttatcacacttgttatgattgttttaccattttacgccattttccaaatagtctcattcatgatgaatagatggaaaaagcaattgaaaggagtatcattatgaaatctatttggaaatcaaaacgctttttaatcggctttacttatctattcatacttatttcagctagttttatttatagttggttctttaaagataacatcccaaaacctcctcagttactttacaatgacaataacgaattacttggaaaggccccctttccgccatcgttaattccaccttttggatctgatcgttttggagagtctgttttcttacaaattgtagaaggagcaaaattcactattttattggccatggcaattagcttctttcgaattttatgcggaacatgtataggaatcctcttaagtttatttgctccaaaactcaagagatttttccagtcatgctcagaagttttttattatattccaactctatttatcgcattcatactcatcacgcccgttaatattataatcacatcaaatgctgatggggtagatccaaatatttcatttacgttttatcaagtactcgtacttattttcgtcgctctgcctacactttctttatacatatcctcagaagttgatgaatttatgaaacaagattacatcttaagttcacaattactgggggctagtcgttttcatattataaaaaaacacttacgagtcttattacttgaccgcttatttgtattatttatggaacatatcgtccaaacactcatactcgttatccatttagcgttgcttaacattgtaattggcggcatacaaatgcgtgaactctatgacggagtgctcaaacctgtttctctatctaatgattgggcaggtcttattggattaaatcgtaatgaaatgaatctttcatggtggattattttttatactctcgcttcattctttattacgattctatttattaagcttatgaccatcgggattcaagatgcactgaaagcaagagattcgcaaattgtagcaattcaaaacgttccagatcataaaaaatttgttaaacataaagattccttttcgtttgcaaataaagtaaacctttaatcatttctcattaatcaagtattaattggcatcgatattagtagaaaataaagaagatgatccctattaaatacagggatcatcttcttatactgtctaacttttttacatgtcctttgctagactcatgctttttatatttaaagtgaattatttgcaatcacaattatgttttttaaaatcaattaccatacgcccttgaattctaccttgttccatttcttcgaatacattttgtactttatctagagaacaagtttgaacaaccggcactacttttccttctgccccgaacataaacgcctcttccaaatctttacgagtaccaactagagaaccaactacttcaattccatccagtacaagtcgtgggatgtttaagtccattgtttctactggtagccctactgcaactactttaccgcaagcacgtactgcatcaactgctgagttaaaggctactttagagactgctgttactaccgcagcataagcgccaccaaactcctcttgcacaattttatcagcaggaccttgagaaattggattgatagtcatatcagcaccaacttctttcgctaaggctaatttgtcgtcattaatatctactgcgattacctttgcaccaaatacatttttagcatattggatagctaagttacctaatccaccgcagccatagattacaataggttgactaggtttaatatctgatactttaatagctttatatgtagttacaccagcacaagtaattgatgatgcttgagcaggatctaatccttctggtacttttaccgcataatcagctgtaacgatacattgttcagccataccaccatccactgaataaccagcgtttttaacttcacggcaaaatgtttctctaccagttacgcaatattcacaacgtccacaagattggaacatccatgcaatacttacacggtcacctatctttagtgaagtaacatcatcagctattttcgtaacaatacctacaccctcatgaccaagaatacggccatcagtgttaccaaaatcatgattcgcaacgtgtaaatcagtgtggcaaactccacaatactctacatctactaacgcttcacctgagtgtaacggacgtaattctttgtcaatcacttcgatgtttgctttgctgtttttattaaccactactgctttcatatgtgatctcccctttagtgttttagcattttaatgagtttatctcacaactactttcttcactactttggctagttattctaccaaatttaagtgttcaatcatcattacatcttcatcataacatgacacttcataaacaacttgtgaaattatgaacaatatttgaattattacacaaatcggtctttattttaaatttttaaaaatgagagtttatcattgactataagtaagtcacatatttctaaaacaaaataaattaacaaacttctcaccgataaaaaagctcttcactcaatattttctacatgtaaacacttagtttcacagtaatatcctttgccaccaacataaactttttctattttatttttgctattggttgctaatttaactaatatttcagaaggcgagtgtaaagaataaccttgttcaaatacatagacttcttttttcaagtagtcctgttcataaaggtagcaagctaatgcaccgttcgaagttccagtcgctgcttcttcattgatgtcgtatagcggagcaaaatttctgcatataattcgattgtcattaaaagtatatagatgcatcccgacaacattataatacttgctgatttctttaattttttcaaaattaggttgcagtgcatgtaattgtgtttcgctttttataggaattaaaatatcttttaagcccgtggagacaatttgaattgggtatttattttctatatctttactatcaaaacagtcgatgaactcgtttggagatacaacatcatagaatatcggtttattttgttccatgaatatgatgtcatcttttatagtaatagtaagaacaccgctgttcgtttcaatcgtatagcgattcctgaaaagtttatttaaatgcatcagtatcgcgaaagagccaattgtggcatgaccacataaatcaacttcttcttttggtgtaaaatactcaaatttataatcagcaatttcagattctgatataaatgcggtttccgcatagcccagttgtttggctatttccattttttgagtagtggtcaatgtattctcaataaataccactcctgctttatttccgcctttatgatccttgctaaatgcacttgcaacataaacagatattttcataagacaccttcctcacttatagtaaattatagtatagaaagcactacatataaattccattggataaattatccctaaaataagaaacaaactatttttagcatttgaactctccaaaaatagtttgtctacagtctgaaagctcttcatttgaagagctttttttatattcgcttcatcgaaatcgtttcacgtatactttgtaaattttttagagtttcctcttgtcgctgcaacgacaaccctacatacaaagtatctaataagcttaactgtgctaatcgtgatgaacttgcttctgtgcggaattcagtctcacgtgttgatgtatataacgttatatcagcaagttgacttaatgctgatttcttatagctcgtaatcgcaataattttggctcctcttgctttcgctacttctaacgcttcaagtaatcctttattgctaccagaatgagaaataccaataacaactgaattttccgagagtaaacctgcccccataatttgaaaatgcgaatcagtatgagcgatacaagaaatacccgttctcataaacttatgatacgcatccattgcaataataccagagccaccatttccataaaactcaattcgacttgcttcttgtaaggctcgtacagcctgctcaagtgccgtttcattaagcaaatgtaaagtatcttgcagtcctgtaatatgcgaatgaaaaacttttttagcaacagttaccatactatcttctgctgatacctcttcatggatattttgcatcggtgtatgtacaatttcacgagctaatgtaatctttaaatcttgaaaaccttgcaaaccaaggtttttacataagcggaatatcgtagcttcggaactattcgtaacttcagctaattctgtaatagatttatgtacaacatcttgtggatgtttcaaaatatgttcggcaatacttcgcaatttcggtgataaaccatttaacgaagcctgaatctttccaatcccacttcttgtaccaggcatagcatatcctccccttccatcgtagctttatcctgtaaaaaccgattagttgaactaatcatcagtggggatggtcctccactgattagagtttcactttattgtacctaattatcgaaagaagaaaaacctatattagggattactataatttttaattgctcctatgtattctgtcatacgatataacagaattattcatgcttatgaataattctctccatgtttcactgcgtataatgcggcttgcgtacgatcatccacttccaatttagctaaaacgtttgaaacgtgtgttttcacagtttgttctgtaatatgaagttctgctgcaatctccttgttgcttcttcctttcgcaatttcgcgaagtacctcttgctctcttttcgttaacattgaaaaaggattttctacttccttctttactgcagaacgccccattaatgcaggtgttactttcgggtgaaaattcgcatttccttgatgtactgcaataatagaagcgacaagttgctcaggttgtacttcttttaattgataaccatctgctccagcttcaagtgctggtataacataatcttgctctgaaaaactacttaatataagtacctttattgtctcatcatattgctttagacgttttgttgcctcaattccatccattttcggcatcgatacatccattagtacgacatctggtctttctttttgcacgaaatgtaatgcctcttcgccattttccgcttccccaataatttcaaattcttctctcgttttcaaaaagaatacaagtcctcttcgaacgatatgatgatcctcaactagtagcagtttaatcttcaaccttattctccccttcaaatcggcaattgaatttctatttttgtaccctttttcagctctgttataatttgaaacgatcccttcattaactgaatacgttcctccatacttttcaggccaagtgctgattcccttacctgttcttgtataaatcctattccattgtcttctatgtaaaaatgtaactggttattttctattttcaaaagaatatgtaccttttcacacgaagcatgctttttacaattatgtagcgcctcttggctaatacgccataaaacttcttctatttcatcccccattgaaaccatcccatcaattcgaacttccacttgaactcctaataacttcccgtaattttgaattgcttctgctaatcctttctccaatccttcaggtcttaattgccaaattaatagcgtcatctcttgtaatgcttcttgtgataattccccaatataacttaacatctcttgcaattctctatcttgcgtcatattcagagtacctttcgctgttagcataatagaaaataacaattgttttactgaatcatgtaaatcacgtgcaagtcgatttctttccgctaccactacatatttacgttctttctcaactaattgaatacgttgtattgtcgttccaatttgaaatgcaattgattctaataatgctaactcttcctcagaaaaatgagtcttatgaggtgcagccacatttagtagaccaaatttttctgatccagacctaagcggaattgtcgcatgatgtgtaacatcttctgtctctccccaattacattcaattgcatcttctattcgcttacattcaataatattagtcgctttttccaatctcccatttacaaaacgttctacacaccaacagtttccttcacacatcggcttcttcttttgccacgtaagagcctctggtaaattttcgtctacaagcatactgtgctttccactttcatcaataaagaatatccaccctgtttgtaaattcattacttgtaacaatgtatgcaacactttttctaacatatcctgtaagtttgttgcttcatttaataattcagcaatttcttttaatgcttctaaacgacgcatctctttttcttcaaagttcattctcatcaccaactacaattataacattaagaaatttctaaattctataaataaaaaaagaaccgaattccttcagcctttctttatatcaatcattttattattgttattctatccaatgttggaagcagaatttttgttaacaaacgattctactttagctgtccgataaagattgtccaccatggatatgctgtaaaccttcagtagtaacaaccatattcgctgctggcatttgcacttgatttttatggaacatagacattaattcaaatcttacttgtctagaagtttcaaaataatcttctggctttattaaacctgtaatacaaaattcatagccaacatatttcaagttaggatttaagtctgtaacaccgacgtatttaaatggttcaacagcctcatcctctactctataaagagtttgattcaatttttcattgcatataacacatacttcttctaacaattccttcactcttgttggatcttcctgataacttaccgtgatgcgttcaattacacgcatccatcctttattaaaattttgtatcgttctaatctctccgtgcgggatggtaagtagttttcctgaccattcacgaatttgcataaaacgaatactaatctcttcaatagttcctgaatttgttccgttaaaagttacaaaatcaccaacccgaaactctttgtccgctaatcttgcaaagcctaatataacatcttttagcatctgttgtgcagcaaaaccgatgacaactccagctatccctgcacctgcaataatactttttatatctacaaattggctaattaaatatatgataagactgatgataatgatatatctaaaaatagatcgaattacactttgaatcgtttgctctatctcttcatcaaaaaagctcgatttcctaaaaaaccaatcaataatgcggtttattacaaatgaaataatgattagaacgaaagcaaatagtaaaaatcttaaaagtaaaaactctcttacataattaaaaaattcttccgtatacgttaataagctcatttaaccacttccttactaattaaaaaattcataatcgcctaagtttgttccagaaaaatctattatcctaatctaaaatgccgctacccttactatgtattttgactctattactaattcactttaaacagtatgtctagctgttctttttcctttccctttaaatataccctttttaataacctaagggggagcaaatcgtgaaatttttttatacgttaaaactttattcatctcattacgatttcaactcatttattcattaactacgtaaaaaaagagctgaatttatcagctcttttattcgatattaattgttgtcttactacttttttcttctttcaattttggcaattcaattgtcagtacgccatctttataatttgctctaacattttcttcctcaacttgtttaaaactaaagcgtcgagttacagaacctatagaacgttctttacgaatatatgtgccattctcatttttttcttctacttcattatgattagttgcttgaatcgttaatacatcttgttcaaaatcaacttgaatgttttctttttgaaaacctggtaaatctgctttcacagtatatttatcagattgctcatgaacatctactttaaaagtatccatgttcagtggcttcaagaaagcatctgtcatcccttctaataaagaaggcccaaaatcaaaaataccattttgacgttttgttatctctggaaataaattacgcatattttttcctccttattatttatgaatgaaagattatctctttctgcctttattataacatttggtcaaaaaaggtcaaagtttttgtttgaccttttttgatgtatattttaccaaataaaacacatgagatatttgacacctcttacatttataaagaggaatatatttatataataacgaatagtttatatgctcttatttttccttaatgaggttacctacaatggggtatatcgaagaaattagagaagttgtcggatcaagaccactcaatttattaggcgttgcggtagctgttttcaatgaacaaggacaaataaaagagaccttttttaaaggcctcttttttcacttcacttctgcatgtaggcatgacttaaaatgtccaagtgcatattcatgcccttgtgcattaaaagatgcaaccgccttttcataaacaacaattttaaaccctttattataagcatctactgctgtatgaagaacacaaatatcagtacaaacacctacaagatgaacttctgctattcctctttctcttaacttcatctctaagtctgttcctgcaaatgcactataccgtgttttatccatgtaatatacattctctgcatttttatatgtttcgtacacatcttgtaattcaccaaacaaatctcttccacttgtaccagctatattatgaggcgggaataactttgattctggatgatatacatcattttcttcatgtttatcaatagcaaagacaacgtaatctccattttcaatatattgcttcgttatatgtacaatttccttctcaatttcctgtcctggtttcccgcatgttaaagcgcctttctcagctacaaaatcatatgtataatcaatatttataagagctcgtttcattactatctctccttctcctgtttcacagtaaacaatagaaaatttgttattacgacatcgtatgtactattcgacatttcaaatgaaatacctacatttttcttgcaaaactcaccttaatccgagtttatcataaagtgaaactttaatcattggagagtttgttcatctccaatgattatcagccctcatcaatcgtgcatttacaggcagttgatctcccacctaatctcctcacctataccgagttttaaggtaaggtcttactgcccgttagtgcgggatataatagataaacaatggtaaaataaatagctcctattaataagtcatgaatttgataattgagcgtagcttgaatcatctcttgtatcgtaaaccaaaatactgccatcatcatactaatcaagacgatacgaatacaccgattcacatcttcaacctctttctctgtcatagtagtaacaagtgattacttcctatttaatcgtattagaaaatgaaataagttattcactcttgcacactctagtccaaacaaaaaagcacactactttttgagtaatgtactttttattcttgttaagacgcaggttttgtctcaaatgttgcttgattaaaactaataacctttcctttcgggtcattgttttcatactgaactgcagtaattgtatgactacctgtttccagcgttttttcttttaactgcactgttgtctgcgttgtactagttacttgatgtttatctgtatacatttgatctacaaatacgaatgtttctttatcactttgaaaattagaaagttctaattcaacttgctgaattaacgtatcctttttgatgaatacagtcggtatattgccgttttcagaagtaccatctggagtaataacttttactttcccttctccaattgacattgctccttcaggaaatacaaccatattctcatcacttgcgtttacaacttgttcttcctgttttgattgcgcgtcctctttttcctgtggagcaccgcaaccaactaataacaatacagacaatccagtgattatgaattttttcaaaattcatcccccctgtaacttcattataatttattatacaaaaataacttttaaattttgagactactttcaacactttcatgaacaaatagaatcttgctcacgattaatgtatcatactttccttaatagaacattaattttttttatgaaataaatagtaattccctcttatctatcattttagcccaacatatgaattacataccctcaaaaataaaaagacattgttagttcaatgtcttttctatgcagcaattaaaaaacaaacgttgtaatctcatctacttcttttcttggaagtttcttcggtttatctttcggaaatccgagtgaaataaccatatttatttgtttttcaggctcaatttgtaaatattggcgcagttcatcttgagctagcaatactggccctgtcattggacaagtaccaagtccctttgcatgtgcagctaacattaagttttgtgccgctaaacagctactcttaatgccttcttcttcccaaacggaatctggaacaaaagcaattggatcaaatatcttttcacggaactttgattcatatggtgttgccaaacatacaattaatactggtgcctccgagaaagctgttgcatatggtccgaaagaacgtgtaagtaatttccctgctttctcttctccattttctgctgcttttgccgcaagtttatgtaatgcatcccatgtcatttgttcaatttctttaatcttctctcgattcatgataactaagaattcccacgtttgtgaattcgtatcactcggtgcgtaacgagcacaatcaattatttcttttatatcattagtagatacttcttgatttgtaaactttctaacacttcgtcttccgtgaattacttctttaaaatcttcataattcatatattaaatcccctttttacagcgttttcaaaacttgtcctatgcttgaattatatcatgaaaaaaagccggaagaataccagcttttttcttcatgattaatttgtcactttaaacaaacgaatactctcttcgtatgcagcttgtagttttttcgtaattggtcctctttcaccagccccgaactgttcatcaccaatttgaacgactgggaatatttcaagtggcgtcgctgtaaaaaagcactcctcagcgtcatatacttcttgtaatgaaaactctcgttcctctacatcgatatgtaactctttcgctaatgtaattacgtagtgacgtgtaataccatgtaaaatgaaatgatccgctggatgtgtaatcaacttattattcttcacgataaagaaattggaatgacacccttcagtcacaataccatctcgtactaatattgcttcttgatacccttgttcatttattttgtttttgatcatgatattaggaagcaaatttaaagattttatatggcaaaacttccacctgatgtcctcttctactgtcaccttaatccctgcctccattgaagcaactggtcttgggaacgaaacaagatttgcaaaatatgtcggttgtaaatctgattcatatacatgattgcgcggttgtgtacctcttgatatttgtaaatatacattcccatcttcttgaaactgatttttttcaatcatttgatataactcttctactaattcttccttcgtaaatggtggaattagttttatttctgccatagagttaaagaatcgttctaaatgtaaatctaataaatgtggcttcccgtcatatagtctgaatacctcgtatataccatcaccaaattgaaagcctctctcctctaatggaatcatcggctgttcttccttcgtatttacaattcttccgttaaataaaatccaatctttatgagtagctttcattcttccccactcctttatcacatgattgttttaattgtacaacttatctacactcaaaagaaggaattttctgtattttaacaaacaaaaaagtgcatctcttatttaaagggatgcactcgactattcatttacttcagaaaatatttttcaatatcatctaacataagatttgcagctacaataccacctgctgtattccaaatcacttcatctacttggaatactttattatttttagaagcctgtagttgcttaaagagtggatcttctgtccattccttcgctaacgaatttccttcattattcttatctgcatctttatcagacgtgaaatagaataagtagtctccgtccatatttggaatctgctcttttgtaattccttttatcgcaaaatcatctttatcttgtaatggtggtcgtttaaatccaatatcatttaaaacaacacccgagaatgagtttttttgataaatacgaacatcacctggcacgaaacgaataatagaaactttagaattcaatttatcgcctaacttctctttcattccttcaatgcgttttttataatcatcaagagctttttgcccttctttttctttatttacagcttttgtataaagtgtaaagttttctttccaatcaccgcgtaatgtttctgcataaacagttggtgcgatttcttttagctgatcatatattttttcatgacgcattttatttccgataattaaatctggcttaagcttcattacagcctctaaattaatatcacgttcagttcctacaacttccgtgttttttaactctttcgctaaatgaggataccattcatcaccagcacgtggtttcgtagtccccactggcgttacgcccacagctaggagagcctctgcgccttcatttgttaaaacaacaacttttttaggtgtaccatttactgtcgtttcacccattgcatgctttaccgtatatgaatcttttgctttcgctgatatattattttcttttttctcttctttactacatcctgcaattacaaccatgagtatcataatgcagaacataattagttttttagtatgtatcatatgtcctccctagatgaaatcgattatcattaacatttaaagattaatgtatcttatatacattgtcaatgtatataagaaaacttttttaatacatactatttagattctatccgcttttctaaggtttctttttaaaacatagtgcataagtatgaaaataaatgttgttattaaaatgcgtatccttgttatacataacaaggatacgcatccatattgcattatcattttaattcctaatattgagtatatttaatatacgctgggtcattatatacccactgatttccaccaaggtttaaccaaccattttcatttatatatactaaataagattctggagaatttaattggcggataactgcagatgtagttgatggaccacttcttaaatttacattcatcccttgtatatatgcaaccccaatcgggcttccatcactattgcttgtctttacaaaattaatgtacgaaggatcattatacacccattgcccattccccaaatctagccatccgttactttcctgatatacaacgtaagattctggagaatttaattgacgaataactgaggaagaagttgatggaccatttcttaaatttacatttttcccaagaatataagcgattcccttcgtttgaggtgtcggttgtgggttagggggttgtggatttggagctactccaaaaatagctgctattccatttgcatacgattgacttagatcttcaataaattgtggattttttaataaatttgcatcaaacgctgtatcaataaaagcagtctcagttaaaattgcatccattgtggtttctcttaataccgcataattttctttttttgctcctcgatcacgaagaccatattttgttaatacaggattgacagctgtatgcattttttgttgctttgcatatgcagtgctgctattggataacgcattataaatataactttcaaaacctgtacccccgccgctattaatatgaaatgaaatgaaataaaataatccgcactgaaagcattagcaatattagcacgttcagataaagaaataaacacatcactatcacgtgtcattttaattgtaattgggtaatttaccgttaaaatgtctcgaacgcgtctagcaatttgaagtgttaagtttttttctactaaaccattaccaacagcaccagaatcatatccaccgtgccctgcgtctataacaagtttcattttattgccccgcccctttcttgtaatatgtttgcatttctactcgtcctattttatgtgaaatgtacaggttctgttacaattgcaaataaaaaaaccgccttatgtaaggcggtttctatcatcttgctttaaccaatttaaaataaatatatacgattgatagtgaacataacgtatgcaaaataaaataaataaaagtgctattccaacaccactataaagtaaaccaaactttaaaaaaacatttacaagtggtggaaagttcattaaattttgtaatgtactaagcatacaaaacataatgaaaaagacagagatgtattgtaattcatacggcttttttttcttactcattcttttccgaatgattatatgacataattctgctactataaagcaccctccaattaatacaagaccagaagtcatcgtcatacatccacctgccttatatttattgtatcgcataaataatcatcgttatattttctttacatactcttcatcttctgaagcaaaaccaaaactctctatgaaagacttcgccttttctgttaatttctcttgtagcactttgatttctttcacatttctttgtttcatcatttcttcaaatgtaaaatacgtatttgtaccataaccgtaaccttggtaatcaaaatgaataattagctgtgataaaacagcccgttcctcttgtacactataatctattacaccaatatatgtatcatcaactttcacacagtactgtacctttttctcacctaaactatgcgatttaaacatttctttaacaacgctttcattttctacagtaactttctcaaacgtaatcatatgttgtccatccttttactattattgtatcaataatacttcctatttatgaaaaaaaccttaagaccgtatgcgatcttaaggtttttctaattaaactaagctatacgcacgttttgtttcttcatggaacttattcgtatcgtatttatgctcaacataaatttggtgccataccataaacgcaagtacagtccaaattttacggctataatcgcctttatctgcacaatgtgcttccagtaagtttaatacatactgtttgtcgattaaatgctctgtcttactttcgtttataatatttatagcccaatcatgcatttcgtcttttaaccagtgacgaattggtactgggaatccaagttttttacgatctaatacgtgatctggaacgattccgcgtgctgcttcacgtaaaatagctttcgtagttccgttagcaatcttaaattcagttggaattttagatgcaacatcgaatacttctttatctaagaacggtacacgaagttctaatgagtttgccattgtcattttatcagcttttaataaaatgtcaccgcgtagccatgtgaacatgtcaatgtactgcattttacttacatcatcataatctttaatctcgttatacaatggtttcgtgatatccatatagttaacactttcattgtaatacttcattaattcagctttttcttcttcacggaagattttagcatttccatagtaacgctcttcaattggtgtacatccacgctctaggaagctcttacctttaaatccttctttaagagcaccacttaatgcttttagaacgctcttacctgggctaggaatgtaagagaacatttttagtgagtttggctcacggtaaatgttataaccaccaaatagctcgtctgcgccttcaccagaaagaacaactgttacatgtttacgtgcttctttcgcaacgaagtacaatggtacagctgctggatcagctaaaggatcatccatatgccaaatgatttttgggaactcatccataaattctttcgctgaaatgaatacgttatggtttttaacgcctaatttctcagcagtttctttcgcaacatcaacttcactgaaaccacgttgctcaaaaccaacagagaatgttaaaagatttggattcatttctcttgcgatagaagcgatgatagatgaatcgataccaccagataagaatgaacctactggtacatcactacgcatatgcacttttactgaatcatataacacatcacgaattgcttggatatgctcctctttcgttgcacttgaagcattgaaataaggtttccagtagcgatggatttccatctctttaccgatttcttttacgaaataatgaccaggctcgattttattaacatcaattgttaaagtttctggctctggaccatattggtacgtaaagtaatgttgtagtgacgttggattaacgcctttatcttccatcacatgcataatacttttcttctcagatgcgaagaatgtagtatcaccttgttgtgcgatgtataaaggtttaataccgaagtggtcacgtgcaccgaaaagtttcttttcttcacgatcccaaatcataaatgcaaacataccacgaaggtagtctacacatttttctttcatatgtgcatacaatgcaatgataacttctgtatcagattgcgttgcaaacgttgcacctttttcaagtaacatttcacgtaattctacatagttgtaaatttcaccattaaaaataattacatatcgatcattttcataagttagcggctgatgtcctgcctctaagtcaatgatgcttaaacggcggaagccaaattgtacatgttcatcacgaaaatatccttcgtcatctggaccacggtggaaaatcatcgtgttcatattttcaaattgatgtttttctgtttctgaaaactctctagggttttcacataaacatcctacaaaaccacacatacttcttaccctctttcagttttcattctgtctctatactactatatcaaccctatttatactagcataatcaactgaatatggcgaccaaaaactataaaaaaatcactccatttcacatttttaacaattttttatgaaaacatgaaaactaggcactcacctttctccgcttttgtcatatgatattgcaaattgatttctaggagggaataccatgagtgaagaaaaaaaagattcttctcgcccaccggttcgtaattacttaaagcaaattgatgatttcttcgagcaaacacctcttcgcaatgtaatcgctgatttaaatcattttttccaaaaaggaaaccgtttattaacattccctgtagatttatatgaagttggtgaagaactcgttgttacagctgaactaccaggtatacaaaaagaacaaatccaaattgaaatacaaagtgaatacttaaaagtctctgtaaaagaagagatacttgaagaggaagaagaacaaacatcccataactattatcgccgagaacgttccatttcagaagcatcaagattgattaaattgccgtattcaattaataaaaaagcggcaaaagcttcttatcaaaatggcgtattagaaattcgggcgccgaaacttccccagcaacatgacattttatcgatagactaatgcaaaaaaataagggtgctatgcacccttatttttaacccactaatcgcttcatatcacgtataatgtcttcgtatggcgtattactaatgccactatactttttcattacttttccgttttgatcaattaaataaaatgatgtaccatgcatgacctgaccgttctccggcttatctacaagtgattggaaattatcttttgaaaactttgtaatatcttctaacgaataccccgttaataaattccagttactagtatcctctgtaaacttttgaataaaagctttcagattttctggcttatcaaggtctggatctacactaaatgaaacaaactgaacgtctaatttctcttcttttgccatcttttgaagcttggccatatttgcagtcattggtggacaaactgtctgacaatttgtgaacataaaatctgcaacccaaactttcccttttaaatcttttgtaccaaattgctttccatcttgatttgtaaattggaaggtttctaaatcccaatttaatggtttacgaagctttgaacctgattcactacatccagcaagtacaaagagacaaaatacaaccataagaccaattattttttgataacgcttcatttataaacctcttttctctatcctaaatttaaataggttatgtttataataacaaaagttaacactacgagaaaattgtttactacatttgttcacgaaatcgtacgaatttacgtatgttacttctttatttcaagcgaattactagacaaaatatatttttttactattatttctctaaataaaagtgataaaactaattttattgttacttttgtaaatacctctccctattttttaacaattccttaaacattaatccatgttttacactgtattccttaacaacatttcggtacaatacaaatacaacgattttaaatgaggtgatgttcatggcaaagcgctatgaaaatatggataatgttagtacaaaaaaatcaattcgctcttttttacgctggcgtaaagaacgaaagcaaaacaaaaaagatttttctttcttagtagaacaatcacccgttaaacaaagtgcatttttacaaagtaatgttgaaaaaacgactatcacatggattgggcattccacttttcttatccaaacgaatggacttaatatattaacagatccagtatgggctaataaattaaagctagttccaagacttacagaacctggactctctatagaagcactacctaaaattgatattgtccttatttcacatggtcattatgatcatttagatttttcaactcttcgtcagttgaatgatgatgttctatatcttgtacctattggattaaaaaaattatttactcgtaagaaatttaaacatgtagaagagtataaatggtgggaaagtacgataattaacgaagtttcttttcacttcgtacctgctcagcactggacgagaagattcttatttgatatgaatacgtctcactggggtggatggattattgataatgaaacgactatggaaaccatatatttttgtggcgacagtggctatttccaaggtttcaaagaaattggtgaacgctttttaattgatattgctcttatgcccattggcgcttatgaaccagaatggtttatgaaagtatctcatgtttcacctgaagaggccgtgcaagcttatttagatttaaacgctacacattttataccaatgcattacggagcttttgcactcgccgatgaagcacctcgtgaagcaataactagacttcgaaataattggaatttgcgcatgttaccgtgggaacaactgcatgtactctttttaggtcaaacttttatttatagtaacgcaacaaatgataagcaaataaacgaaaaaattgaaactttacatgtgtaacgtaatgactgattttctatatccaacatataatatagaaaatcctatagtgaaactttaattagtgggatttcttcatccccactgattatttgccttcaccgatcaagcttttacgggcagcccgctacctaacctctttgctccagctaaatttgaggtagagagttttactgtccgcaaatagcaggataaagggtgttttctatgaatgaatatttacagactcgctatatcattagcggtagtgcctgtgtagctcttcttatttcttactttctatttacataaaaaagctacttgaaatatattttcaagtagcttttttattactctgctaaatacataaatccgattgcgcccggacctgtatgagtactaataataggcgttgtatagaaaatttctgattgagcaaatccactcactttttcaaccgccgctttcatactttcagctaaaggaattgctttcgcatgcggaattgcaacagcttttacgacttttccagccgtatcttgctcaaataacttagctaatgtttttacaatttggccttggctacgaactttcgttacaggattataaacaccgtcttcaagactagcaattggctttatattaagtagcgaaccgataaacgcttttcctttaccgatacgtccacccttcactaagttttctaatgtatccactactacatataaacgagtattctttcttacttcatctacacgttttaaaatttcttctagtgagcgtccgtcatttgccatttttgcagcttcaattacttgatatgctaaagcatgtgtaataaattgagaatcaacaactgttacttttgtatcagtcattgatgcagcgctatttgcagttgctacagtaccgctcattccacttgtcatatggatagaaaggacttcgcttccatcttcccctagcttgtcatacatttctacaaatgtacccatagctggttgtgatgtttttggtaattcctctgatttaatcatttcttcaataaattcgtcaggttgtaaatcaacgcgatctaaatatgtttgtccatttacagagattgataatggtaaaacatgaatgtcatacttttcgattacgtcttgtgataaatctgccgttgaatctgttacaattttaattttttgcatactatacttcttccctttccaatacgctctccttgttattatactagtattcccattgctttcaacaatttggaacgaaatttcatcaaattaattatattttcatatctaaaatgaaaaagacagagtttactaaccctgtccgtacttcgtatcatgcatttttttcaagggtatttgttttatatacatttaaataatcattccacttcaaacaattttgtaaatattcacggaaagaatacgaaaatcttgggtgtttttgtctttgaatttttgcaataaataattgaagacgagactgaattagaaacgataatggatgctgtgcctgtaggacagggatttcgaatattttaatgcaatcccctgttgaatgagtgaaataaaaacttttcgtaatcacaatatcaatcctctttttcattggatttttgaacttcctctactttgcgctgtaacacgttgtttaaagtggagtaaaatcagacttatatgatttctgtagtccttatggctagaagatttatactctattcatctccacctaattcaccttcccgtcctaaatatctctgagacgggaatctcattatccatcaattgtttaatacatttagtataagcttataaaagcgcaaagtttgtctaaattttggagattctataatttttttcttctatatattgtatacgtttatagctatagtataacaaataaataaaaaagtgcctttataacgaggcacttttcgactgcatttcttctcttttctttttcctcttactaacaacctttgataacgcaatacttacttcataaatacaaataagcggcactgcaactaaactatgagataaaaagtctggcggtgatatacaagatgcaatgataattaatgctacgtaagcataccttcttatttttattaaaaattccgccgtaagtattccaatgctagttaaaaacattacaacgactggcaattcaaaaatcacagcaaatggaactgttaaattaagtacaaaatgaaaatacttttctgtcgtaaacatcgtattaaacatttcattacctatcgtagttaaaaagtgaaatagaaacggcattacaatgaaatatccaaaacataaacctgcgagaaataatatagacaataccggtatatacattattgtcatcttttgttcatttggatgtaaacccggttttacaaataaccaaatttgtatagcagcaaaaggaattgtacaaacgatagcaaatactgtagcaatcgagaaaaaaatccacaatacatcacttggaccgagaacagttaatttcattggtaaatcttttacaagccaaaaataaatatcctttgtaaaagtaaatccaataattaaaaatagtacaaaggataacaccgtatatattactctttttcgaagctcaacaatatgttctactacgctcatttcccgatcttccatctcgttcaccacactttatttatccattacaaggaaaatacactacattttttctttcttttccttttcttgaaatgcgtcatctgtcaattctttcgttgattttttaaactcttttaacgtttcccctaaagccttcccgatttccggcaattttttaggtccaaataaaatgagtactgctactaaaattaaaattaaccctggaaagccaatatttgaaaacatttccccatcccctttattagtagtttccttgtcctactattacataattttattttgtcaaaaaagtttgaaaacgtcaacaaatccattgtcttttgtcaaaaaaattcaaaaatataatcaattatacaaatttcattttctattgctcttgtgtatgatatggtaagggaaatgacatattattttatgatagtagaaaggatttgcattatgactgaaaaaatgacacgaatgacccaatttgtaaaagaagaaattgcaaatgcaattacacatggtatcggtgccattttaagcatccctgccttaatcatattgattattcatgcttctaagcacggtaccgcatcagctgtagttgcatttactgtttatggtgtaagcatgttcttactgtacttgttttcaacattgctacatagcattcatcatcctaaagtagaaaaaatatttactattttagatcattcagccatttacttattgattgctggcacgtatactccttttctacttattacacttcgtggcccattaggatggacgttgcttgctataatatggacactagcaatcggaggtatcgtcttcaaaattttctttgtacgtcgctttataaaggcttcaactttatgttacatcattatgggttggctcataatcgttgccattaaaccactttatgaaaatctaactggacatggtttttcactacttttagcaggtggaattttatattctgtcggagctatattcttcctttgggaaaagctacctttcaaccatgccatatggcacctgttcgttttaggtggtagtgcgatgatgttcttctgtgtactcttttatgtcttacctacagcataataaaaaaggattcagcttactataagctgaatccttttttattacttatgtaattgtgatgcgataacttcctgtgtatgcttcgttaattctttaatatccatattcgcataatcttcaggtgtaatcggcttagaaattgttactgttgcatgagctggcttcatacgatttccattcgcttcaaacatcttatatgtaccatctaacgttacaggtaaaattgctacacctgactttactgccagatgaaaactaccagccttaaactctccaacttcgccacccttacttctcgttccttcagggaaaattacgatagaatgtccattttttaatagttcaattccatctttaatcgcttgaagagattgacgacgatcgctacgatccataaatacacaattcataagttccatccaagttggtacaactgggaactttttaatctctgcttttgaaacgaatccaattggtttatttaagtaacctagtaaaacagggatatccatattactttggtgattacttacaactagtactggcttgtctttcggaacattttcaagtcctttcacttctactgcccctccagctacacgtaccattttcttaccaaaccaatttgtcgttttatacacagcattatctttttcttttggcgccatcgtatttacttgtcttttaagacgccacattctcggtgtaatcgcaattacgattaaaattaaataaaagattttaaaaaacgtttgaatcatacagaacccccacctattatcattccgaccttcattatactagacaaacgaaggaaaaagaagaaaaaaagtccaaacagcaagtgtttggactttttaagcattctatattagaaacgttttgctaattcacgagcattagcaattgctgcttctttaatttcttgtgctttttcagggtttgcattcataccttcaactgcgatatattcagtatcatttacaccgacaaatcctaatacagtctttaagtgattgcgaccgaagtctacagctgcgtatgctccttcagaatatacgccacctgttgcctgaatgtgaagtgcttttttaccttctaataagccgactggaccattttcagtatatttgaatgttttacctgcgattgctacgttatctaagtatgcttttactactggtggatagctaaagttccacattggagttacgaatacataacgatctgcattcataaatgtttctaagtttgtgttcattgctgctactttttgttgttgaacttcagttaaagcttcaaagccttcacctgctgcaaatttaccccaagcagcaaatacatctgcatcaattgctggtactgtagtgttgaataaatcaattgttacaacttcgtcttgtggatgttcgtttttataagcttcgatgaaagcctcccctactgccattccgaaagaaccttctgctgaatttggatttgctgtgataaatagtacttttgtcattgtattctctcccttttttctctttatctttaattcaagatttgttttttaaaagttaataacttaccttatgtaagtataatacaaaaagttttaatcaatgtcaataaaaaatagctacttttttttcgtaagttaatgatttactttgtttccttaaaatttagtatacagatattaagaattctttcgtataaaaaggctacctctacaacttatagagatagccttctattacatattatttttgaaatacatgttttactttttcagctggaatattactcccgcctctaccttttacatcttcaatcatcattgtaatgaccatatctggtgaatttaaatcaaatgcagcgaaccaacctagttcttttccttcggcctcttttgatacttttaattccgctgtacctgtttttccagcaagagtcataccatcaattttagcaattttccctgtaccatctggatcattaattactttcgtcattgcagtttttaatatatcctgatttcctttagaaattacattttctttccaagcttttggttgtttatctgttttaataatatacggtgacggaatagttccatcatttacaatcggcgcatacgttaaagctaaatgaagaggagtcattaatacttgtccttgtccatatcccgtatctgccatttgaatatcatttttaatgccgtcatttgcaattttagaagcagggaatccatattcaattggtagtttctcatcgaatccgaattttttcgcttcactcataaacttgtcttttccgatttttaaagcttcttgtgcgaagtaaatattatccgagtatttcatcgccttatcaaaatcaatcggatttgcatctttcacacgcgttacatagtaattaccccaagaagaatcttttgtccattttaatccttcaattttcaactcttcttttggatcaatcgttttcgtttcaagaccaattgcagctgtaataggtttaaatacagaacctggtaccgacaattgtgtaaaacgatttgtcattggttttttcggatcattattccaagcttcgcgttgtgccttcgatgtccctcgtgcaattatattaggatcatatgctggactacttactagtgcaattgtttctccacttttcggattaattgctgcacttgaaccagcttcgcccttcatttcattatacgttttttcttgaacaacactatcaatagttaaagttacattttctccatcaacagcatctgtttttgctaaatttttaatttcttttccttgcgcatcttctacaaagacacggccacctttcttaccgcgtagcttttcctctaatacttgctctaagccagctttaccaactgggtcatcagcttgatagcctttcttttgtagcgtttttaaatcttcagcatttacctttccaatataaccagtcagatgagctgccgcttcccctagcggatatgtacgaacatttacaggttttgttgaaacacctggtaaatcaatgtacgtattttgtgttgccccttcaggcaaaattccaattggtacgagataccctggttttacccatttagcagctaatttttgatcaatttcttctacagacgtatttaataacttcgctactgtttctttcgtttgcggagcagtatcgcctaacttttcaggaatcaatccgatttcagaagctttcccattcgttgcaagaccttttccattacgatcgtatatttcaccacgttttggctgtgttgtctgcatacgcactttactatctttcgtcatgccagggaaaataaaatcaggagtccaatctattttccaagattctttatctccatctttttcttttaccatttttgcttcatgaccaaatgtgattttaccaccaactgtatccatgcttactttaaaaggaacaggaccttcatcttttttatcttcttttacttcccctgtttctacctttaagtctttcacttcgataccagaataaattttttcatatttctcagtaaactctttctttgaaatatctttttttgcattttttgatagttgatcatacatatctgcaaatttttgtttattccacgcttttacatatgtatcaaacgcttcttgtggtttttcttctttaccacatccaactaacatgaatgttaagcaaagaaaaagaatcccccatatctttctcaatcgattctcctcctctttctatattagtacttttgaaaattttagcatttttacatgctacctatcattatagcactatcgaatctcatctataaacttatattggtgaatataaataaaaagattgatgtgaattctcacatcaatcttttttattattgttgcttctcatatacatggtaataatacgtatacgggtttttttcatccgttaaacctttttctacaaaaatctctttccaatttgtcatatccatttctgggaagaatgtatctccttcaaatgcataatggatttttgttatatataacttgtctacataaggtaaaaagagatcgtaaatttgcgctccgccaaaaataaaaatctcttcttcatttttacatagttcaaatacttcttctacagaatgaacaacttcacacccttcaacatgatacccttcattacgagttacaataatattacgtcttccaggcagtggtctaccaatcgcttcatagttctttcttcccataataagcgggtggcccatcgttgttttcttcacgtattgtaattcactcggtaaacgccaaggtaaattattatctttaccaattactctattttcgtccatcgcgaccataaatgaaacaatcattttttcatctcctctacaattatactgcaaccggtgctttaattgctggatgcggatcgtatccttcaatcgttaaatcttccatttcaaaatcaaacacagatttcacatctggatttaatgtaagtttcgggaatggacgtggttcacgtgccaattgcttttctacttgttcaaaatgatttgtataaatgtgtgcatctccaattgtatgaacaaattctcctacttcaagaccacattcatgtgcaattaaatgtgttagtagtgaataacttgcgatgttaaatggaattccaaggaatatgtcaccacttctttgatatagctgacaagaaagttttccgtccgctacataaaattggaataatgtatgacaaggcggtaatgccatactcggtacgtcttcaggattccaagcagaaacgattaaacgacgtgagtctggtgtttttttaatcatttcaattacatcttttaattgatcaagtgtctcaccagctgtcgttttccaagcacgccattgtttaccgtaaacgtctcctaaataaccatatttatttgagaactcatcatcttctaaaacgttctttttaaacaattccatttgctcatcgtactgtactttaaattcttcatcttgttgtgagcgaagaccaaaatcagtcatgtcaggaccagtatactcatcactttctacccagctcttaaacgcccattcattccaaatgttattattatgctgcaataaatagcgaatatttgtatcacctttcataaaccaaagtagttcacttgctacaaggcgaaatggtactctttttgtcgttaataaaggaaatcctttgctcaaatcaaaacgcatttgatatccaaatacagatacagttcctgtccctgtacgatcttctttcttcgtaccatgttccattacatggcggcataaatttaagtattcattttcagcatgtttcatatgtaggaaaaccttctttcaatcgtatatggaatttatcataacatgaaaaatggtaaatttaataatcttaattaataaaatttcttgcgctaattcttacaaaattattaactttccatattttaaaaggttttcattttctattaccgaaagtatagtgcggtagatcaaaatttatatttggaggttagaaatatgtctaaaattgaaacacctgttatgacttctttacaaaccacggttgaaaaaatgatgaaggatttaaatgttcctggtgttgctgtcgctgttataaaagacggtgaagttattctttcagaaggtttcggctatcgtaatatggaaacaaaagaggctgttacaccgaatactcgattcgcaatcggttcctcaacgaaagcgtttggtacactttcattaagcttgttagcacagcaaaaaaagtttaattgggatgctcctgtcccgtcttatatacctaactttactttatctgaactacttgctagctcacaagttacaggacgggatttagcttctcatcgaactggagtgagtcgtcatgaggctctttggtacagttcttccttatctcgaaaagatctcgttgaaaaaataaaacatttaccacttgatgcaccgttccggactgcatttctatataacaacttaatgtatgcaacaattagctacattgttgaaaacattacaaatcaaacgtgggagcaatacactacagaacatattttagaacctttaaatatgagacatacaaacttctctgttaacgattcacaaactacagatgattacgctttaccttacattgaaaatgacggtgaaataaaagcagttccattccgtaacatcgatacagttggcgctgctgggtgtattaattccacaattgaagatatggcaaattgggtacttctccacttaaatgaaggaaaatttggagatcatgaattaatctcctctgaattattacaaccaatgtatacaccacacaattcaattccagaccaaccggttttatcactccctgaatctccattaaatagttacggtcttggttggtttattagcgcttatcgtggtaaaaaagtgattcatcatggcggtaatatcgatggattttcagcgcttgtttcattcataccaacagaaaacataggccttgttattttaacgaatgctggaggaacattacttcctacttatctcgctaatcaaatttatgacgaactacttgaattagaatccattgattggcataaacgtgctgtagaagatactaaaaaaatgaaggaaatgatgaaagaagcaactgaatccctccctgaacaaattaaagggactacaccttcgcacaagttagaggattatactggtacttttgaacatcctgcatacggaacattacaagtatacaaacgagatgattcgttatatgtacaatttatggaaatggatattcaattagggcatcatcattacgacatcttctccacaaaagttgacttattccaaatgaaaatgagcttattattcgcttatgaaatgaatgtaagtggtgaattcccatcccttcagttacatgtaccagctacattaagtactcagccgcttacatttaagaaaattaaataagtatcttgatgttaaaaaataaaggtaggtgcgaatcacacctaccttttctatttcatatcaatcttatctggttgaaaccaaattggcttcgataactcaaagttattatgatcctctaaaactatagtaagacgctctaacatatcatctaacatatgcggcgctgctcgtaatgtccagacaactgaggagaaaactgtcatgccaacgtacaccgtgtataatttccagaactcctctggtattttcctattaaagtatccttctatttgtccgattgaatacggaatactaatatcccttgcaaacagtgcaatttttacgaaatcatgaattgggtcgccccagtcatagccattaaaatcaacaacacctacatattttccatcccgtacaattatattttctaaatgaaaatcatcgtgttgaaatcgattcgggcggctctttaaatatatttcattttcttctataaactttatgattttatcatcattttttatttttattccgcatgttttgtatacctctacatatttactatgttttttcatagctctttcataccatggaagtatatccttaggagcttcaaatgtatgcatttttgctaaatcttttcctgcctctataccaatatcatattgttcttttggtgaatacgtaggcaatagcttcttcgcatcttccccttctaaatatgaaaaaatactatagcatacaccttcttcttccaatatacctatttcaattggcctttgtgcctgtacgttacgttttaccatttcatttaaaatttgaaactctattttctttctttcatactcttttatatcgcctgtccgaaataaatatttttcattatttgcattcgtaattacatatttcttatctggagagaaacctttagaaatttcttcaatattcgctgcatcttttactatttgtatattgctttgccgtgctgtaattatcttcatatctattccccttacatttctgcatttggtgtataggcaacttctacaataaatccattcggatcgtaaaaatcaatcgtatagtaaccttccgaataatgattcatttcaattggaccacgtattaccttcactttcgtactagaaagaaaatctgctacttcatcaactacttctctatgaatagcttgataacaaatatgtctaggccctaacgtccttacaatttcctcatctacttctttaaagtatatttcactttctcctgtgctatatgctatttcatttaactttctccacccaattatggaaaacaacttattataaaaagaaatggactcctctaaatttgctacccaaaattcaatatgatgaatgcctgctcgcagtgtattcatattaagaatacgctccttgtactacttgcacaatttccatcggcttatgaaccatgtaatctggtgcatcttttttcactgtttcaataacatcatatccccaagatacccaaattacgttcactccagcctttttacacgctgctacgtctcgctgttcatcaccgacatataacatatctttctctgttattttttttgatttcaaaaatctttttatcattttatctttaccgaacaaatttttagaacaatacacttcttgtatattttctatatcattcttttgtaaaaacgcccgaatatgctcttctgagttcgatgatatgactgcaattccgtagccttttttatgtagttcatctaatacttctttcatcccatggaacaaaacgagattttttatagccggctgatataatttataaaattccaacgctaatatcggtaatttatacagtggtacattaagttgtttacatctctctggcatcgttaatttacgtaaatgttcaatttcgtcttcctttactgctttatacccatgtttttcagcaagttgattataaatcggtacaaatatattttgtgagtctactaatgtgccatcaaagtcaaaaacaatatatttttgcattcccatactccctttgcttcttttttctaaacctatgttattcaacaacatagttgtctgtcccttctataaaaataaaaaagaacaagattttctcttgttctttttaagaaagccatttcggcggtacattcgtattccaataaatatttcctaactcatgatgtccagagtatccatcatcaaaacggtggtaatggaaattaaaataataaccatcttgcggtggatgatctcttcttacatggaaacgcaataaatcatttcctgatttcgtatcgtagacatgaaaaatcttttcattattcccaccagctggtttttgagaaatcgctaatgattgtagtgaatcttctggtacatcactagcaagctcagcaattgcctcttcaattttcggtaatattacatctttaaactcatcttcaattactggaccaattttagtaccaaacttttgcatcgactgcttctctgcttcttgcattgcataagtaataaaagtatcggtggttaacctgtcattcgcttcttcatatgtgtaggacgtgctctccaaactttgttgcccagctgtgctcgtaggcttgtccgcagctttggcattatcaagtaatatggaaggaggcgtcactaaaccaaatgtaaacacggtaattagtgcgactaaggtttttctaaaccaatttggcatttatgttccctcccctttcactcattattttttatataacggtggtttcttctattatacaaaatgattgtaattattgcactttacaattttgttaacgttcacatatttttcacttgaatatgaaattgtaagatttcatacaataaaaatacaacaaaaataaggaggcgatcagatgactttagatgtcatgtattccgccgcaagtatactcgttttagtatattttatttatcaatgtgttacagactagaaaaagagccatcaatggctcttttttaatggtagaaatacaatccatacaatcaataaaataaaaacaatgccaccaatcacagctggcaataaataaaaccgggaaagtataactattccatataaaagtattgctggtagtagtaaataacgatctgccttccatcttaacaatagtaatttcccttcatcacaatatacacgaagaaacatcttattcgtaaattcagtccaataatcacgtgcatagcgagaaattgcaactacagcaaatacgagaacaatagccgcaatccaccttggagtcataattatacttacagtactgatacatacaatttgaatataaaatattcgtgcagtacttgtacggaaaaattctttcaaaaaagattcgacaatacgagaatcagcttttttccctaaaagtcttttagagcgaggaaatatccacggttttttattcgaactactcggtttagccgcatgaccaccaacttgcataattccgctcgtccagcgcatgctttcctccttttctttctcgatttctttaaaaaagaactttttataattcattttctcttttactaatacactacttaagaaaattactagaccgataaataaaattgaatacaatggatttttataaataaaaaataaactaattccaaaaaaggacacgctcatagaaaatactacattttttacaatccataaaacccatcgtttccccacatgtacatgaataaatctcgttaacaacgacaacataaatcgaaatatagtaaagaatacccaaaataataggacttgtatccctgttacttcgatactttccatcaacaccggtaacataataacgactacaattatattcgttatcgctattcgaacaaatgtgtacatcatgccatactggactaattttcgcatatgtgttgcatacgaaattaaaaataaactatccgcttgctcaaaaaatgaacgaactcctcttccatatgtaatcacataaaatgcgagtaatcctaatccgaaataaatcgtctcttccgttgataattcatttatccatagcgatcgataatagattcccataaatataagtgctggaataataatatataatgcgactgtccaatctgttaccgaacgtatagacttccatttccgctcaagttcatggcgtaatctcttataaaattgttgtttaatcatgttgttcacgccttacaattacatcaaagcagtctaataatgaactacccggcatttccgctaatatttgaatagattctaaatgtccatctgcgactaatgtaccttgtgaaatgagtaaaaatctttcacaaattttttcagcagtatctaatacgtgcgtacaaaataaaattcctgccccgcgctctttttctttatataaataatttaaaaactctttcgtagctaccggatctaaaccgataaaaggttcgtcaatgatataaaaatctggctcagttaaaaacgccaatattagcatcgatttttgtttcatgccttttgaaaattttgataaatactcatgtttatgcttattcattcgaaaagtatgtaataattgttccgctcgttcttcccaacttcccatttcacttccacgagctgccattaataattcaatatgttcccagagcgtcaagtaatcatagtatgttggatgttctggtacgtatgcatacggatttttcttttcaccgaatgatatttcaccgtccatatttacaagtaatccgagtatcgttttaatcgtcgtactcttcccagcaccatttgctccaataagagcaactagttcacctttttcgatagaaaaagctatatcatgaattattttttcgcctatttcatatccagctgagcggatatttacttttaacatgcattccccttctttccatttctaatacaatcaaggaaaagaataacatataactatctatatatcattataaaatatttattttcatagcaggaaaaaacattttttaacagaatattaaatgtttgattacattttattggagtggataatatgtcttttcaaattcgtgaagcaacgatagatgatatagacgcactttgttctttaacgaaagaattaaaaggttcctctatttcctatgaagatatgaacaaccgattacaattcgtacaaatgagtccgtttgattttttatatgtttacgaggaagaagaagctatatttgggttacttggatttcgtatacgtgaaaatttagaagatgtaacacgttatggagagatttcaattattagcgttgattctaacatacgacggaaaggcattggacaagtgttgatggattatgccgagcaattagcaaagaaacataattgcattggcacatggctagttagtggaacaaaaagagtagaagctcatcctttttacaaaaaattaggatatgaagtaaatggctacagatttgtaaaacatttttaaactacttataaattgaagggactataactatgacaaacattaaagcaattttcattgatcgtgacggtacaattggtggtgacactacaatacattatccgggatcttttacattatttccgtttacaaaagcagctttgcaaaaactaaaagctcaaaatataaaaattttctctttcacaaatcaacctggtatcgcagatggaattgcaactgtagccgattttgtacaagaattagaaggcttcggttttgatgatatttatgtatgtcctcacaaacacggtgatggttgtgaatgtcgtaaaccaagtacaggtatgctgctacaagcagctgaaaaacacgggcttgatttaacaaaatgcgctgtaattggtgatcgctggaccgatatcgttgcaggagcaacagtgcatgcgataacgatattggtgcgcacaggcgctggatacgatgctttacatacgtaccgagacaaatgggcacatattgaaccaaactacattgcagataactttgaagatgcaacaaactgggttttaaatcaactataatacaaatgaaaattttgattcacccgaaataatttaaaacatagttaaaatagcctttttggcaaataattgtattccacaaaacggatcacctcaaaaggtagcaagttcccttttgatacgcaaacattgcaattcaaattatattttttattagtaacagcaattaacgtaaagaaggaatagcttagtggctatcccttctttattgacttctattatttacatttgttatctgtttttattgagtattctcatcgtttttatactccaaaatatcccctggctgacactccaaagctttacatatcgcttctaatgttgaaaaacgaaccgcttttgctttcccatttttcaaaatagaaagattcgccatcgtaattccaaccttctccgaaagctccgttacactcatttttcgttttgctaacatgacgtcaatattaataatgattgtcatatccgccacctcagaccgtcaaatcattttctgattttatgttaattgcctcttgtagaagtcgttggaggatagcagcaaaaacggcgataacgagcgaagcaaaaacgataatgagtcccactaacccaataggagggtccatttttttcgctataaaatgaaaaagtggcaaacttaatacatacaaaccactgattgtaattgcacagcgctttatattctttaacgcctttactgataattccgagaacgctgtgttctcatcaatgtactgtaaaagattgaaagcctgataaagagcaacgtaaaaaggcacagctgctacatacagtacaattaaaacaagatattttatcggagcaatgttaggatacaaattcgctgtgaaatccgccatttccggcactaaaaatatgcataaagcaagcactgaaattccagcaagaaaaataattacttttaagaacattgttgaacttcgtttaagattcatttacaatacctcacttatttaatggcaacataattttatcacaacatttattgtttaacaataaataaatatcgttttattttcgtcatgttttttaatttaggcaaaaataaaaaagaatttctcattacaaagaaattctttttcttgaaaatgtctctttcaacttaattttttaaaacgttaattcgtaatggaaataacgattatctctcaaataaccattttcagcgtataatcgttgtgctgataaattatcaatctccgtttgcagctttacaccttttgctccattttctaatgcgtattctttagcagcttctaataattttttacctgttccggctccacgcttcgccgcttgtacaaataaatcatttaaaatccataattctttcattgaaatagaagaaaatgatggatatagttgcgtgaacccaatatattcgccgtcttcaactgctacgaaaataacagactcttttttctcaattctatttcgtaaaaatacttttgccccttctaaatcagaatcttgcctataaaacatgcgatagttattaaaaactgatgctagtccatctaaatctgcaattgttgcctcatatattctcattttactccattccccttccaatactgtctcattatatccgttgcccatttaggctggtgtatttcttctgtcggcataaactctttcattattggttttatatccaatataggagtgccatcaatagcatctaatccctcaacaataattgatttaccttctcttttgatcatctttacaattgttacacctatgcgatttgggcgatttttcccgcgctgtgcaaaaatacctacttcaggataatccttattatttctaggatgtctagcaaaatactgaatttgctcgtcagttactttatgaaaataaaaaacaacttcaatatgagaaaaatcttcaaccccttgtatactctcttctgcatacatttcagttaaagttatacgagatcttacttctccccactcatcatcttttatttcctttctttcattatgtacaaatgcgattggttgaactgaaaacatacgcattcccccttaaatgtaaccacttacattataaaatattttctgaatgttttccagatatacgaataaagtttacataatataattatactctatctagagctaccttgactgcttcaattgcatgtatatgagttgtatcaaatatcgggacagatacgttttcttgctttattaataaccctatttctgtacaacctaatatgattccctgtgctcctttttgcactaactcttcgatgcctcttttataatattctctagattgagatactatttttcctaaacataattctgtatatattactttatttatttcttttctatttttttctgatggtactattacttttatattattttcttctatacgtgacttatagaaatcttgctccattgtatatttagttccaagcagaccaaccttttgaatgtcttttcttttaatttcttttgcagttgcatcagcaatatgtaagactggaatatcaattttggcctttatttttccaactaccttatgcattgtatttgtacaaatgattataaagtctgctcctcccttttgtaatgaatatgccgcattccctagaatttctccagcaccatcccaatctccgctagactgacatcgttcaatctcttcaaaatccacactattaatcaaacattttgctgaatgtagccctcctaatctctcttttatttcttcattaataattcgataatattcagaagttgattcccaactcataccacctataagacctatcgttttcatataaacacctacctaaacttttttataaaactaataacaacgttttattatgtatattatacacaataaaacaagactttaagtttgggatataaagtcttgttttaacgtaataatatagaataattgtactttcatttccaaggaaatttttatagaatattctgaaattaataatctgatatttttataaattctttatacttataattaaaacactctcgatacaactctttgatttcatcatatgatggaacacgtgggttattagctgggctaccactttcaattgcatctgatgccattttagagatagcattttcaaattcaatttcatcgataccgtattcttttaaatttggaatacgaagatcatagcaaagcttttttatttccccaatcgtgtagtctgctacttcctcatcagaattcgaatacaaatccttatttaagttacgtccaatttttgctaaccttttcactgcacttgtttttgtaaactctaacactgtaggtaatagtatggcatttgatattccatgcggtacatgaaataatgctcccactggccttgacattccatgaactaatgtaactgatgcattcgaaaatgcaattccagcttgtaaggaagcaatcatcatcgcttctcttgcctccatattatgtccatcttcatatgctatacgtaaatatttcataatactttcaatagctgaaagagcaagtacatctgtaagtggttgtgaaaatttagaaatataagcttcaatcgcatgacataacgcatctattcctgttgctgccgtaatttgtggtggtaacgaacttgtcaaaactggatctataattgctactttcggtataaaactaggatgcttcatcatcatttttacatctgtttttttattcgtaattactgctacacttgtaacttccgaaccagtaccagaagttgttggaattgcaataagtggtagtggattgttttctatttcaatatccttttggacataatcctcaacttctccaccatttgtatataaaaccgctaccgctttcgcagcatcaatacaacttccaccaccaataccgataataaaatcgcacttttcctctttacaaagagataacgcttctaatacgtgtatatttgtaggctcagcatccactttattatatgtactaacaataatacctttcttatttagttgttgcatacacttttcaacatatcctaatttctccataattgtatcagtaactataaaagctcttttccctaacttttttgattgttctcccagtttttcaagcgaattccttccatataataccgactttggcatacgaaactcagaaacctcttgcaagtcccccaccccttcttatcctaattaatattttataatataaattatcgatttgatgaatctttacgattcaaattttttaatagagtcctgttaaagtatagaatgcgataactaaaaatacagcaaccgttttcaaaatagtaatagcaaatatatctttatatgactgtttatgtgttaatcccgttactgtaagaatagtaataatagccccgttatgtggtagtgtatccattcctcctgatgccattgatacgatacggtgcataacttctaatggaatatcaaattgattggccgctgcaataaatttatctcccattgcgcttaatactattcccattcctcctgatgccgagcctgtaattccagctaaaatattcgtcgttactgcaccattcactaacggatttgtgaaagtagcagagatgccatctctcataattgcgaagcctggaagtgctgcaatgacaccaccgaatccaaactcagctcctgtattcatcgttgcaagtagcgctccaccaatacttgtattcaatccagcttggaaacctgttactactcgcttccaatataataataacgttgttaagatccctataataagtgccaattctacagaccaaattcctactactgcacttaattctacttttccaaatgctttcataccaattgcagaaaaatcaaaaccgcttggataccacttcggtatcataatagtaaacactttattcattacacctactaaaataagtggtataaatgcaataagttgttgcgctcttgtgatttcaatgttattaattaatggcatatttttttgttctacttgcaaagatgctgccatttcagtatttccatcattaaaaccaaaatatccttcacctgctgcttttgccttcttacgtctactctctaaatatagtaaacctaatgtaagaacaaaaattgctcctacaatcccaagtatcggtgcagcataaatatccgttttaaaaaatgttgtaggtattacattttgaatttgtggtgatccaggtagcgcatccattgtaaacgttactgctccaagaacaatcgttccagggattaaacgctttggaatattagcttgtcgaaacaacttagctgcgaacggataaacagcaaacactactacatacacactaacaccactatacgttaaaatagcccccattaatacaatcgctaatatagtacgtttttcaccaactaactcaataattgtttttgcgatagaatctgcaattcctgacatttccactacttttccaaatattgctcctaataaaaacacaggaaaatataattttataaatccaaccattttctccataaagatattagaaaagaaaggtaatacataactaggttctgtcaaaaatactgcaaataatgcaaatatcggcgcgaataaaataacagaaaaacctctgtatgctacgaacataagtaaacttagtgctaataatataataactaactctaattttacccctccattaaacagaatattctaaattttattgataaatttctactaaccttttaattctgacatccctcctcttattcatacaaatttttatgctaaaaatgtctaattataattattcgattacatatgaaaaatccctttaaacagaaacgaattcatcgtcatacgttataaagggattgctagaatctatatttactgctgtattaaatttttctctatacaaaaatgatacagttcttcaacatctttcactatgtaggtcgcactaacttcagtcagttctttttcacagccatagccatataaaacaccaattgaagcaattccattctgatttgcacctattatatcgtgctttctatcaccaatcattatcatttcttctttatttagttcttcatgtgtttgtaaaatatgagcaattatttcttctttttttattctcgtaccatctaaattacttccaatgatgtcttcgaaataattcgttaattgaaaatgctctataacttgtttcgcaaatacagtgggctttgaagttgctacgaatatgcgattccctgaactttttaattgttgcaagagcttcagaatcccctcttatacattattttcaaacaatccacgctgctttaaatactcacggaagtaaaaaacagcacgttcaacctctccttcactcatattatatctctctatgaatgattgctgaataggaggacctataaatgaatctaactcacttatatgtacttcttcaattcctactttttttaatgcatataaaaccgagtttacaatcccttctttcggatcagttaaagttccatctaaatcaaatagaaatattttatacatgcttcattcctccacttaatttgctgtataaataagtgctaacatctcttccacttctccctattatactattattatctattttttcgaaaaatcaatttccctatgtcacatactttcagttacaaaatacgatagatatgatacagtaaaaaagttacaattattttaatagaaactggtgaaacaaatgtcaattacgttaatttttataatggctttcacaattgtgatccacgcagttgaaacaagctcttatagtattcgattagctggagtacgtttaaagaagattgcggttgccttgtctgttgtaggaatggtgttacttatttcaagaacatcaaacttactacaagcctttttaatcggtggtattgtcgatgaagcaaaactagattcttctattaatttagagcatattatacgactcgtactattatcggcttctatcggtactttaatcgcgatcattctttatccaactttgacaaaattatttggatatgtcattcaaaactttgaaacagacggttctttcattcgaatgatgaaaacgaataacattcaaaaattaaagtacacaaaaaaatatgtccgttttccaaagttagaaatgattcatagactgcgtatcggtggtattccaaagcgtattatgcttattaacatgtttgctactgctatttatacagcaggggtactttcagccctttacgcttcttttttaaatccagattatgcaacaaatgcaagtacagcttctggccttgtaaatggtttcgccactattttattaactgtattactcgatccacgcattgctcttttaacagaacgtgctctacaatcagaaagcggtgctgaatctatgagtaaaatgtatggttggctaatgatttctagacttctcggcacattattagcacaactgctatttgtaccaggtgcttactggattttatggattattgaactgatgcattaatttactagaaaggtgaatttatcaatgaagatcaaaacagagaaagatataattcgcttaatagaaaacgacgaatggatgatgaatgtattacaaatggcaaaattactagagctacctgattggtggatttgtgccggatttgttcgttctaaaatttgggatactttacatgactatgaagctaaaacggctatgcctgatgttgatgtgatttattatgatagtctacatcaagatgagatatacgaacaatcattagaaacgaaattaatgaatattgatgctactatcccttggtctgtaaaaaatcaagctcgtatgcatgtagtgaataatatgccaccatattcttcttctgttaatgctatttctaaattccctgaaacagcaacggctttaggagttacacttgatgaactaaacaacgttatcttaacagccccatgtggtattgaagatgtcctttccttacaagtgaaaccaacagctcattttcttgaatcgaaagaacgattacatatgtacaaaaacagagttataaaaaagaattggcaaagtaagtggcctaacatcacaatcacatatccagaaatttagaaagggtgcctctcatttatagaagcacccttttcttcatttcaaaaaatgtatgactgtttctgcaaatctatctgcttcctcataatgaggtgaatgaccgctctcttcaaatacgatatacttgccgtttcgggcatctttattaaatgttttaatttgttcttcacacgttactacatcatgttttcctactattaataacattagattttgtacatcttttatttttgataataatgatgtatgacatgctccctctaattttaatctatcaaagtgaattttggagcgatttgaaaatatttcccactcttcatcactgtataaactctcatctgtcctattttccttattattgtaaatctccattcttttttcttctaattcagcgcttagtcttatataagcttctaacaactcttctgaactagcatcgctagatgaataagcaaagcattcttttgctatttcttcttttccatacttttttaataaatgtcctgtcttttgtaacaaagccctacttgttaatgcaaaattaaaagttggtccttcaaatattattttctctattgaacttggatatatcgacgcataaagcaatgctacatatccaccgaaagagtgtccaattatagaccacttctcaatttgtaatactttttttaattcctcacagtcttcaatcaaatcatttaatccaaaagcttcgtcttcagttatttcttctgagcgacaaacacctctttgatctattataattacatatagagaatcttttaaacgttccgcttgatgaaatgaaaaatcataacaactttctcctggtccaccatgcaagtataagactggcttatttttaggatttccatgtgtttcaacgtatagctttttccctctaatattcatgtatttccctgcttctatcaaattttcctttataatcaccacccccctttttttactgaatattataacatttaatattaaataattcctattacatttaagaagacgataattattgcaagtggtgctacaaatcgaagtaaaaatgcccaacaagtaaatactttctttccataatttccacctacaaaaaactctgcttctagtaccttcttctccattttgaatgaaacgaaaatactaataaatagtgctccaagtggcattaatatattactagataaaaagtctactgcatcaaaaatattctttccgaaaatcgtaatatcactccatactccaaatgataacgctgatggtatacctaccaagaaaatgccgaaaccgatcatccatgataatttcgttctcttttcttgttcaccatttgctaatgctgaaacaacagtttctagtagagaaaatgctgatgttaatgtcgcaaatgtaaatagtgcaagaaatactgttaagaaaaatccaccgaatgggatttgactaaatacagatggtaatacgataaatagtaatccaggtccttctgttggctccattcctaatgaaaatacggctggaaaaatagcaagacctgcaaataatgaaacaaataaatttaatccaacaattgttattgctgattttggtaaactttcttttttatttaaataggaactatacgtaaccataattgaaatcccgatactaattgcaaagaatgattgccccattgcgaacaaaatactttccgaagtaatctttgagaaatctggttgtaagaaaaacttcacacctttcattgcatcatcaagtgttaacgaacgaataataagagcgacaaataaaacgaacaatgctggcaacatatatttacttgctttttcaattccgttttgtacaccctttgatacaacccatatcgtaatgaacataaaagcgaaatgtcccataatagcccaagcaggattcccaattgtttcagtaaataatgtaccgtaattttgtcctggagtaatcagttgtccagttattcctctgaataaataaattaatacccatccacctacaacactataaaacgaaagtagtataaaacaagttccaacaccaaggcgtccaatccaatgccatcccgtatttggtgcgatgcttttaaatgctccaactgcttgtttctgcgtactgcgtccaatcataaattcagctataagtagcggtagtccaattaaaacagtaaataatataaatattaaaaagaacgctcctcccccactcttcccagcgatataagggaacttccatatcgcaccaagtccaattgctgatccggctgccgccattataaaacctaatttcgaagtccattgctccgtctgtttcatctcattttcctcctaattaaatctttttatataaataaataaattttataaacctattcaaataaaccctccatttcttcttccatataataaaaaaatggcctagcatctctatataaagagacgctaagccatttacttaacgcggtaccacccttattgattccattatgaatccaccttagtagtaatcgtttgattacaaacctaatatcgaaggttaaccgttaagatttactaagaatgtaattccgttccaccttactgctcctaggcgagttcaggatgttatttgactatgtcacaccaacccatagctctctgtacaaatacatgaccttactactcctattcaacacattttaatatttagaatatattttcttttgaaattaatatgaagtatatctgttatatttgtaactgtcaagggtatattgatttttttgtcgaaatggttcatatttcaactgacttttactaagcttattagaaaaagaaagagtctatattttcaccttttcaaacgaactataaaaaaagaatcttcgcgataatcgcgaagattctttttacggtatgagacgagtacaatctctcggaaaagcactcgcctctcgtacatttgttaattctaaaagtttatatacaaccctttctaacccaattccgaaacctccatgtggtggacaaccatatcgaaatgtatttaaataagattgaaatttatctgggtgtaatcctttttctttaaacgaagcgagtaacatttcataattatgaattcgctgtgcccctgacgttatttctaatcctttatataataagtcgaatgaatcagtaatagctggattctctttattcggcatcgtatacatcggtctcgcttttttcggataatgcgtaatgaaaacaaattcactattatatatttccttcacatatttccctagtaacttttcaccttctgtatctaaatcccctacaggagattctttacgatacttacttttcaaaatttcttgtgcttctaacaatgtaattttaggtatttcagtaataacaggtacttctatttgtaatagttgtagttctatttcacattttttcgctacttgttgaaacatatatcgtaaaacatccgtttctagttgcatcacttcataaaaatcatgaataaaaccaagctctacgtctaacgatatatattcattcaaatgacgggaagaattatgatgttccgctctatatacaggtgcaatttcaaaaactcgttctaacccacctgccaccatcatttgcttatagaactgtggtgattgtgctaaataagcttctttttggaagtatggaagcttaaaaacatttgctcctccttctgccccttgcgaaacaattttcggcgtaaagatccgtgtgaaatcgttctctataagaaattcactaaagctttgaacgagtgtagatttcactttaaaaatcgctgcggttcgctcatgccttaatgatattactcgctcattaagtagttgatctaagccaacttgtaacttctttttatttatttcaaatggaagtggctctgcactgtttattactttcacttcatgagcaagtacttcaacacccaattctgttttcgatgtctcgactatttcaccaattacgtggacgacactttctacatcaactttatatccagccaattcattttctaatacacattgaattactcctgttctgtcccgtaataataaaaaactaacatttccaagatgtcgaatcttttttacccatccttgaagtaatacaacctttccactttgctttttacattcttttgtgagtgaacgcttcattattgaatccattatttttccctccagtaattttatatttatttacgttattgttgtcatcgtcatcatccacggtcactcaccccctttcaaagaatacaaaaatccgcccctataaatagggacggatttttttccgcggtaccacccaaattgtcatactgaccatcttagccctgataacggtaggtaccgtttgcttttactaataatcacgttcaaagcaacactcacaggtgtctttccatcatgcggtatcgcaacctttccagcaactggctgctctctgtagacctttgcaccatgtacttttcctgatcatcactttttatatttacagagtattctaactccttatcttataaaacgcaagctttttttgaaacattctggttttataactcctaacttcttctaaagtgtgaaaagttaattttgtaatacatattcttatgtattacatccaaaattacacctttaatattttccaatttttacataaaaactaattcatttacgcatattaataaaaattttaaagcgaggtgtgtatatgcaaaaagcaattagtttctttctccttttgttttgcttaattgtagtaaacgaaacgtatgcctattcaccaaaatctttaccaatctctcaaaactctgatcaatggcaagtgaatattgataaaccgaaaaaaacaaacaagaatatgcttcaagctaaaaaagatgaatttcaaacatatcatttttcagtaaagaatgtcgggaatagtgaagtatataatgtaaacgtcgaagtattccgcaacgaaccaaataagaaaacgaaatatgaactcttttccctaaaggaaagtcgtttggcaagtggaaaaactggatttgaacacgctaatttacccgttgctacaaaagcagatgaagttgatgttattattacatggcaagaacacccattccgatcgatgcgaaatggtcaaaaagttgaatctagaaaatttaaagagcattttgtttttaaagaagctaaaaagtaaatgggatacggatatattcacactatcattgatatagctttatttactagtaccagttcttaagcaaattaaaaagtcgtggcttataatgaagtgcaccccaattgttagacacagtctaacaattggaggtgcattttttatggctaaattttcttcaaaagaacattttagcaaagaaaatgattgattttgtacatgcttaaacaagcgaaaatgtacatgtttatcttgacatttacacttaaaaataaatcattttaatatagatgaattatgtattccagaaagaacattagttaggatagaaaaataagctttgaaatattttttagaaaaaggcgatttcactttgggtgaagtcgccttttagttgttatatgcatgttatataagaaatgagaagtttatttgataaaggaaaaaagtatggagataaataaaattatgttttttgttaagaaataataagtatggctcttctcaaaagaacgtaagttcgtgtataataggaacgaatgttcttttaagaagtaacctaattatagtttagaagtaaattcgagtttagtaagtattaaaaataactaagggatagtatggctaaataaatgtataaatgatcaaggagataaaaaatgaacgatgtaaagatacaaaaagaagaaagagagtgggttccgtttacagtaatgtccgaacgacttttaaatatgagaaagattattggagagaaattaaaagtacaaaaaccgcttttaacaaatgaagcaaaagagagaatttctgataaattattaacgtcattactgtctgagaaagaaatattggtaacatattttgaagatggttacatactaacaagctacatgactgttgtacatatcaatccggtaaaacaaattgtaatttgtacagacgctttttataaaacttacgtatttaacgctatggatattattgaaataacgtaaaagaagctgagtattaaatggcagcttcttttatttctgatttatgagacaaataatacaagaaaaagcagctagcttcgtgctagctgctgagccccagggaaagggagaaaaagatagggtactccaaaatcgacaagagctgtcaaacagcctgattatagtatagacaaattaaaattttctatacagaaagttgaacataagattaggctgtacccacttggttttgatctgcaaggtcagaatcaaatgtattggtcgcgctaacaccgctaaaagtattaacaacaaaaccaacgtttgatgcgccggaaccattataagctttcgtattttctttcggagatacgttgtagaaatcacctaagttaaatgatccattgctattttgtacaactaaatttcctacaactgatggcataattttcacctgctttataataagttgttaacattactatatggagttatagttcagatggttcatacaataaaaattgtggaatagtaaaacgtttggagcgtggatttcaataaaagtgtgttaaaattaatataataaagttgagtaattttttaaaaaaatttgtataattgatatatatgaaaataaaggaggcaaaatgtaatgaaagatattatgaaaaaagttgatttaacagatgccaaatcaagtaatcttgttgcactaatttatagtaatgaagttatattagttgaagacgcattttgtccaaatgaaataaaattaaagtttaatgaaattgcaattttatctgcaattaaaacagctcatattgcgaaagtgtctattaggaaagaacttgaagcgctttttcatgatacgggtgttatattagtgaaacaaaatgttgattatggtagtagccaatctattaccatgcattttgagcaatttaaaaaattgcaagatgagattgaacatttaaataagagtatgtaataaagcagctaaataaaggttctatcataaaggtggaatgtgttgtgttgaaaaagtggtttagaaattatttgggtgaatcgcattgtaaacataaatatatttttattaagatgcaggataatgaggattttaaaaaaggtacattaggtgtagtttatatttaccagtgtgagaaatgtggaaaagagaagttgaaatataaaaataataatgaaataaacaatgaatttttagatatatagcaaaaagtaaccatgatggttacttttttgtttatgtatgcaatatcaaaactattactaaagtatgagttgagttgatactatagtaaatcgctgaataaaaatgaagagagtaagatatagggaaggaggatgagggaaatgaagcgaaaagaaattagtaaatctgtaattattacaggcgtgacacaagggttaggacgtgcgatggttgatcgatttcatgaattagggtggaacatatatggttgtggacgttcaaaagataaaattgaagaactaaaaaaacagtacagtaaaatacatgatttccaagtaactgatgtttcagattctcagcaagttaacaattgggcaaattatatacttaatagacatacggctcccaatctgataataaataatgcatcaattgtaaatcaaaatgcacaactttggaaaattacggctcaagaatttgaaaatgtaatgaatgtaaacgtgaatggtgtagtaaatgtaataagagcatttgttcccgcaatggtagctaggaaagaaggaattatcattaatatgagttctagttgggggagagaaggtgaagctgagcttgcgccatattgtgcctcgaaatttgcaattgaaggtatcactaaatctatggccctggaattaccccatggcatggctgtagttgctttagatcctggagggagtattaatactccaatgctgaagtcatgtgcgccacaatatataaatgaatcgcctacacctgaaacttggtcacataaagcgattgaatatatattgaatataacaatagataaaaatggagattcattgacatgcccagcatgcgtataaaaagcacctttaaggtgctttttatattagtagcacattatatcattcacaaaattacatctgaaaaataaaataaaagattaagggtgagatttgtttgttttgaaagctttagaaaatatttgaataggtgataaaaatgaatccaagcagtttaaaagtgacaggggcatggtttcaagtgggagggaatcttacagctgctattggaacgacaagaggatttattggagaagagaaagttgaatcggatcttgttattgtaggaagctcattacaagccctcggatatatattacaaatcattgcgagcaagtatgatgatggggaagaaaaaagagaaaatcaaaatataggcttagagaatcaaagtaaattacttgatcagataggaattgagttattagcattaggcaatatatcaaatgtaataggaacatattttaatataaatgaacaattgaaagaaaatgattatcttatcattacagggaacagtttacaatcgatcggtgcttttttaggagtagaagcagctttggtggatataaatgtattacagaaaattattatactgggtaactccatgcaaagtttaggggctggattacaagcgtatcaaggtgttttaaatgtattgaaagatgagaaagaaaataaagataatatttttgataagaaggatgagagaatcattgcactcattggtatttggatacaagcgataggaacgttaatttccgcaattggaataactgcaatagaggaagaaaataggctagaaaacaatgaaaagtctgaaatacttatataaatagaaggagatacattgattttagaggcaggttaagattaaaatggtagtaggtttttttgcgtatattttgaaaagtgatatataaaatacaaaataaggagttttcaagggatgatgtatttattagcaatttttcttccacctgttgctgtattgttttgtggaaaaccatttcaggcaataataaatttcatattaacattaatattttgggttccaggagttatacatgcaattcttgtagtgcatgataaaaaagctgatcggcgtttgaaaaaacaaattcaagcatatgatgaaattaataagaggaaccgaagataattcatctgtaaaatgtttttaaaagaaaggaggattcacctcctttcttttttagtgggtgttaagtttaaatttttgtgtggcggaaagaatttttaatgtaagtattatgataataacttttagattgtgcatgtaataggccagtataaatgctttctggtacattaaagaaatcatacataccatgctttaattggattcgcaaaatcatagaaaaaggattataaccaacagcaactatattttttgaggtaaccggagatagcttcattattatgcaactccttatttttcatttttaataattctttgtaggtaacggtattgtggtgttgaaatctttataattaaagaggtattatacctatattcaatatatttaatattggttatacgtaattataagtaagttcacacgaagttcatattgatatgctatttttatttcacctttgatttattaataagaaaatattgaccatttgaaaaaaaggtatattatttatacgaggtaataaaaattcacttctttcattattatgctaaaaggggcagcattattagaaaattagaagtgaaaatagtatgtataagagccattttaaaatttgtaatctgtgaattgggaaaatattgaatgctccaggtcaatacactttcttgcctaaacgtatttacgaaagtgacctcaatatttttaattaaatcaacgggagaattgaaaggcaggagaaagtaacatgtcagaaaattatcgttctcgcgaggagcgacgacaagttaaaaagaaaaaacaaccagcttctaaaacacaaaaaccaaaaggtaaaacatcatttttccgcaagtttttaattacttgtttattacttggtattgtaggtttagtggcgggggttgctacctttttcgtaatgattaaggacgcaccaaaactggaaaaagcaaaacttgttaatccgttatcctcaaaaatttatgataaaaacggggatttggtatatgaatatggaaaagaaaaaaggacgaatgttacgtatgatcaaatacctaaattagtagaaaatgcatttttagcgacagaagattcacgtttttatgagcatagcggagtagactttaaaggtactgcccgtgctgttttagtgagtcttaaaggagattatggctctcaaggtggaagtacgataacgcagcaagttattaaaaactacttcttatctatggataaaacaccaaagcgtaaggcgcaagaaatatatttagcttataagctagaacaacagtattcaaaacatgaaatattagagatgtacttaaataaaattaacttaggtaatcgttcatatggtatcgcaacagcagcacaaaactactatggtaaagaattgaaggacttaacattaccagaagttgcgatgcttgcaggtttaccgaaagcaccgaataactatgatccaacgaaaaaagaaaatgttcaaaaagcaacagaaagaagaaatgttgttctaagtttaatgaaccgacatggatatataacaaaacaggaaatggaagaagcatcaaaagttgacgtagaaaaggggcttaagcctgcagctcaactacaaacaatgccataccctgcatttatggatgcagttgtgaaagaagtagaaaaagaattgccagatgctaatattggttctgacggtttagaaatttatacaacgttagatccgaaagcacagaaacttgctgataatattttaaataataatatcattgattatccaaacgataaattccaaggtgcattcacatttatggatacgaaaacaggagaagttcgtgctataggtagtggccgtggagaaaataaagctgtatttaaagggcataatatggcaattgaattagatcgtgcagctggttcaacgatgaagccgattttcgactatgctcctgcaattgaatatttaaaatgggctacgtatcatcaaatcgatgactctccatttaagtattcaacgggtcaagaagttcgaaatgcagatagaagttatatgggtccaattacaatgcgtgaagcattaaaaatgtcgcgtaatattcctgcaattaaaactgcaaaagaagtagggattagtaaatcaaaagaattctctgagaaactaggtattacatttaatacagcaccgacagaatcgacagctattggtacaaatgaagtatcgccaactgaaatagcgggtgcttatgcggcatttggtaatgaaggtaaatatacgaaaccgcattttgttaagaaagttgtttatccagacggtaagtcacaaagttttggacaaaaaccaaaacaagttatgacagattctaccgcatacatgattactgatatgcttcgttctgtagttacatcgggtactggtacatcggcaaatgtaggctctttagatgtagctggtaaaacgggtacgacaaactattcatcaaagcaattagctcaatataaaattccagaaagtgcaactcgtgatagttggtttgctggatatacaccgcaatatacgatggcagtatggactgggtatatgaaagatggtaaagacgagtatattagtagtaaaaacacgaaaattgcacagttaatctttaaagaaatgatgagcgaaatggctacagataaatcacgctttaaaatgccaagtagcgttattcaagaaggtagtgagctacgtataaaaggtgaaaaacgtgattcatcgccaaatactagcgtaccggatacaacggagcaaccaaaacaagatcaacagcaaaaaactgaagaagagaaaaagcaagaagaattaaagaaacaagaagaactgaaaaaacaagaagaacaaaagaaacaagaggaacttaagaagcaagaagaacaaaagaaactagaagagcaaaagaaacaagatgagcaaaataatggaaatggccaaggaacgacacctccagcaaataatggaggaggtcaaggaaatacgacacctccagcaaataacggaggaggtcaaggaaatacgacacctccagcaaataatggaggaggtcaaggaaatacaacacctccagcaaataacggaggaggtcaaggaaatacgacacctccagcaaataacggaggaggtcaaggaaatacaactccaccagcgaccggtggtaatgcaggagaggcacctgctaataatgggcaataagaaaaatttataaaaaatattaaaaagcacttaagatttgtgaaatttacaatcttaagtgcttttttcgtttaaatgtagtagctatgaaaggatctgttttaaatgttaaacgtaccataaaaattttgaaaataaattgatgggaaatgataaaagacttgagtcggaggtagtggaggataactatggctatgaatgggagtactactggggtgtgtaccatgatgccaaaatgatggggtaacttgaccgggaatttgatattgctgccaagttgcgggaagttcaattcctacatcggagctagctgtatgaactgcaggaacatgtatcccaggagtcgaaggaactacggcagttactcttaataatacccacatgaaatattcactcctaagttgagttaataaattagtatattcttttcacacatataaaggtacatattatataggacttttgtttaaaacatgcgtacaaagtcttaagactaatgtaagctgatggtggactatttaatatgaaaagatacgtctatttgcggagggaaaagagataaaaaaaatatacaatgaaggtgttaatcgtaatattttacgagtgtatggaggtatttttatggaacgattatggacgaaatcatttattcaaatgactttcgcaatgttatttttatttacaggattttatttacttgttccaacgctcccgctctttattaaagagataggtggcaatgaatcgcaagttggacttatgatggggatgtttacaatagctgctgttgtaatacgaccgattattggaggaatgttagatcaatatggtagaagatcctttattattttcggactcatcttttttggcttaacgatgtattcctataatatagcatcgactattgtccttttagctgttttacgtgttattcacggagtaacatgggctgtttctacaacagctgttggaacagcaataacggatattattccagattcacgccgcggtgaaggtatgggttggtacgggatggcgatgacaattgcaatggcgatcggacctatgattggactatgggttgtgcaaaattattcatttgatggtctatttttattagcgacgttgttatcttttatggcagtcgtattatcattaataacgaagatgccatttacaccacaaaaagaaaaagggaagatgcagctatttgagaaatctgtattaacaatcacgattgtagtattctttttatcgtttgcatatggaggaataacaacctttttaccgttatttgcatcatcaattcatgtgaatccgggaactttctttcttgtatatgcaattgcattaacaattgtaagaccaatttcagggaaactattagataagtatggagaagtattcatcatacttccagcattatgtattactattttagctatagttgttttaactatttcaaatggtttgataggtgtaattatcgcagcaacattatacggtattggatttggttcagcgcagccagctttgcaagcggcaatgcttacaattgtcgatccgagtaaaagaggagttgcaaatgcttcattttttacagcgtttgatttaggaatcgggttaggtgctattttacttggagttgtttcacaaatgtttggttatcgtattttattttcagggagtgcaatttcagcattgatagccttaattattttcgtcttttttgtaaaacaacgattaggaaaaaaagagtttgcataaactggaggaataaagatgagaatttcaattgatcgtaaagctctgcaatggttccaggaagaattacgtataaagcacggtgaatctgtacgttttactgtaaggtacggaggggatagttcaattcagcccggatattctttaggggttgttgctgagagacccgatggcgaaatagtgtcagttgagaaggaaggtattatattttttgtagattgtgatgatctttggtattttcaaaactatgatttatttgtaagttatcatgaggaaatggaagaaattcaatttaattatgtaaaataataactttattaaaaatgaataagttttatataaaaattatatttaagagatagtgaaataaatatcatatagtaacgagctgtatttatgtacagctcgttttttctatttctcaaataaaattagaataattgtatatttggcggtgttatatgaaaaatctttatattttgtttttgaaaatacgcaaagaagtctatcctttctttataaaatataagaattattttcaaaaaattgtattgttacattaagaaaagtgtaggaaacttatcattataaaataaattgaaatcttctaaaaactctgatacattgaaatagaaatgtagtttcacaatattgtaaaggcttacagttatgtgcacgaagatctattaggattggaggaaataatgatgaaagctgaagagaaattttccccgggattagatggtatagtggcagcggagacgaaaatctcgtttcttgacacagtaaaaggtgaaattgtaattcaagggtatgacttaatcgaactctcaaaaacaaaagagtatttagacattgtgcaccttttattggaggaacatctaccgaatgaagatgaaaaagcaacacttgaaaagaaattaaaagaagaatatgcagtaccagaaggtgtattcaacgtactaaaggcattgcctaaagagacgcatcccatggatggattacgtacaggtgtgtcagcgttagctggttacgataatgatatcgaaaaccgctcgttagaagtgaataaaagccgagggtacaagctgttaagtaaagtgccaaacattgtagcaaatagctatcatattttaaataatgaggagccaattgaacctcttaaagaattatcttatagtgcgaatttcttctatatgttaactggtaaaaaaccaactgaacttgaggaaaagatctttgatcgttcccttgttttatatagtgagcatgaaatgccaaactctacatttacagctcgcgttattgcatcaacacaatcagatttatacggcgctctaacaggtgcagttgcatctttaaaaggaagtttacatggcggtgcaaatgaagcggttatgtacatgcttttagaagctggtaatgttgagaaatttgaagagttattacagaagaaactatataacaaagaaaaaattatgggctttggacaccgtgtttatatgaagaagatggatccaagagcacttatgatgaaggaagctttaaaacagttatgtgatgtaaaaggtgattatacactatatgaaatgtgtgaagctggagaaaagattatggaaaaagaaaaaggaatttatccaaatcttgattattatgcagctccagtatattggatgctaggtattccaattcaactttacacaccaatcttctttagctctagaacagtggggttatgtgcgcacgttattgagcaacatgcaaataatcgtttgttccgtccacgtgtaaattatattggcgagcgacatgtacttagtaaataagaacaactggggagttgttagcgccgcccgccagatgggtgtttgaccgacacccatcattaataataacgaattttcgacagaaaggaaagaatagcatgattaaaacaaatgaaattaagcaaaaagatgcattattagaagagattaccgattatgtattaaataaagaggttactagtgcagaagcattcagtacagctcgttacgtattacttgatacacttggatgtggaattttagcactgcaatatccagaatgtacgaaattactaggaccagttgtgccaggaacaatcgtgccaaatggtacacgtgtaccaggtacgtcttatgtactagatccagtaaaaggtgcatttaatatcggatgtatgatccgttggttagactataacgatacttggcttgcagcagagtggggacatccatctgataacctaggcggaattttagcagttgcagattatattagccgtgttcgtatttcagaaggaaaagaagctttaaaagtacgtgaagtattagaaatgatgattaaagcacatgaaattcaaggcgtgcttgctttagaaaacagcttaaacagagttggtcttgaccatgtattatatgtaaaagtagcaacaactgcagtagttgcgaaaatgcttggcggaacacgtgaagaaatctttaatgcattatcacatgcgtggattgataattctagtcttcgtacatatcgtcatgctccaaatacgggctcacgtaaatcatgggctgcaggtgacgcaacgagccgcggtgttcatcttgcaatgactgctctaaaaggtgaaatgggttatccaacagcattatctgcgccaggatggggattccaagatgtattattcaataaacaagaattaaaattagcaagaccactagagtcatatgtaatggaaaatgtattatttaaagtgtcatatccagcagaattccatgcacaaacggctgcagaatgtgcagtgaagttgcatccggaaattaaagagagattagatgaaattgaccgtattacaattacaactcatgaatcagcaattcgtattattgataaagaaggtccattaaataacccagctgatcgtgatcattgcttacaatacattacggcaattggtttattaaaaggagatatcgttgcagacgattatgaagatgcagtagcaaacgatccacgtgtagatgaattacgtaataagatggttgttgttgaaaacaaacagtacagtttagattaccttgacccgaacaagcgctcaatcgccaacgctgttcaagttcactttaaagatggcacagtaacagaaaatgtggaatgtgaatatccacttggtcaccgcttccgtagagacgaagcaattccaaaagttgttcaaaaattcactgcaaatatggcaggtcattattctagtaagcaacaagaacaaattcatgaagtttgtttaaatgaagaaaaactagaaaatatgaatgtaaacgaatttgtagatctattcttaatttaataatagggggaatttagaatggcttgggttgtgaaaaagcagtcaacacaagaggagcttgcgaatcgattccgagctttagtagaagcaaatgaaattttgcaaattccaggtgctcatgacgcaatggcggctttagttgcaaaaaatacaggtttttcagctctttatttatcaggagctgcttatactgcaagtaaaggcttaccagatttaggtatcgtgacgtctactgaagtggctgagagagcaagagatttagtaagagctacagacttacctgttcttgttgacattgatacaggatttggtggtgtactaaatgtggcgagaacagctgtagaaatggtggaagcgaaagtagcagctgtccaaattgaagatcagcaattaccaaaaaaatgtggacatttaaatggtaagaaacttgttactacagaagaattggttcaaaaaattaaagcgattaaagaagttgcaccgagcttatacattgtagcacgtactgatgctcgcggcgttgaaggattagatgaagcaattgaaagagcaaatgcatatgtaaaagcaggtgcagatgcaattttccctgaagcgcttcaatcagaggaagaattccgtctatttaatagtaaggtaaatgcacctttgcttgcgaatatgactgaatttggaaaaactccatattatagtgcagaggaatttgcgaatatgggcttccaaatggttatttatcctgtaacttcacttcgcgttgcagcgaaagcgtatgaaaatgtgtttactttaattaaagaaacaggctctcaaaaagatgcactttctaatatgcaaacgagaagtgaattatacgaaacaatttcatatcatgactttgaagagttagatactggtattgcaaaaacagtattatcagaagatcaatagataaagcagcgaaggcgatgaaaatacatctttggcaaaataaaatgcttgatgtgaaaaatcatcgccttctattttcaaaaaagatattccactcatcgtagacgagcataagcaaaaagctatgaaagccgaatgatagggggatacatatggagaaaacgaagttaccatgggatgaatttttttcacttaataaagatataaatcatacttactttacaccagaagatttttcaggtgatgaagatttaatcgcaaaaacgacagaacaattcgttaaacaagaaattgttccacaaatggagaatattgaacaacataactataaagtttctcgtcaattatttgagaaagctggggaacttggattattaggcattgaggtaccagaagattatggcgggttcgagttaggaaaggctgtctcaggtcttgtagcagagaaaatggggtacgctggtgcgtttagcgtttcttttaatatacacgctggtgtcggtacattgccttacatatattatggaacgaaagagcaaaaagaaaaatatttaccgaaaatcgcatcgggagaatggattggggcttatgctttaacggagccaaatgctggttcggatgcattaagtgcaaaaacaagcgccgtattgaatgaagagggaacagcttggaagttaaatggtgagaagcaatggattacaaatgctcatatggcagatgtatacgttgtttttgcgaagacaaataaaggaatgacagcgtttattgtcgaaagaacatgtgaaggtgtatctattggattagaagaaaagaaaatggggattaaaggttcttcaacagcgactcttattttagaagatgttgtcatccctgctgaaaatgttttaggggaagttgggaaagggcatcacgtagcccttaatattcttaactttgctagacttaaacttgcttttggaaatattggaacagcaaaacaagcaattggtttgtcggttcaatatggaaaagagcgaaaacagttccaaacggaattagtagactttacgatgattcaagagaaaattgcaaatatgattattgctacatatggagccgaaagtgcagcttatcgtacagcaggtgtaatcgatgaagcaattcatgagagcgatgaagatcttatgaagaaaatgtcccaatttgcaattgaatgtgcactgaataaagtaaatgcttctgaaacacttgcttatatcgtagatgaagctgtacaaattcatggtggttacggttatatgcaagagtatgaggtagaacgattatatcgtgatgcaagaattagtcgtatttttgaaggaacgaacgaaattaatagattaacagttgctaaaatgttaatgaagcaaatcgaacaattagaagacactgaagtagaaagtaatgtagcaaatgtagaaagaaaccatcgttacattttattagcgaaaaaattgttgaaacaatctttgaaaacgctctctaaaactccaggtctaaaaattgaccaagaacaagaatattcacgtgtaatatcaaatatgttgacggacgtgtacatcatggaatcagcgtttttacgtacgagaaaagcagtacgtaaaaatggagaggaaaaagaacgtacgaagcaactcataacggatgttatttgtgaagaaggataccgtaaagtagaagaagcggcgatttctgtactttcagcagctgtcacaaaagaacaagatagacatgtgattttagctgaaatccgtcaattattagtgcctttatacacgaacgtatttacgaagaagagagaaattgcgaaagctattataaatcgcgggaaatatattgtgtaaataggaggaaagcgatatgaaaaagattggttttatcggtttaggtaacatgggccttccaatgtcaaaaaatctagttaaatcaggttacacagtatatggcgtggacttaaataaagaggcggaagcgtcctttgaaaaagaaggcggaattatcggtctatcaatctcaaaactagcagaaacatgtgatgtagtttttacaagtttaccttcacctcgcgctgttgaagcggtatattttggagcagaaggattatttgaaaatggtcactcgaatgtagttttcattgatacaagtacggtatcgccgcagttaaacaaacagttagaggaagctgcaaaggaaaagaaagtagactttttagcagcacctgtgagcggtggtgtaatcggagccgaaaaccgtacattaacgtttatggttggtggatcaaaagaggtatatgagaaaacggaatctatcatgggcgtactaggcgcgaacattttccacgttagtgagcagattgatagtggtacaactgttaagttaattaataacttattaattggtttttatacagctggtgtgagtgaagctttaacattagcgaaaaagaacaatatggatttagataaaatgtttgatattttaaatgtaagttacggtcaaagtagaatttatgaacgtaattataaaagttttatagcgcctgaaaactacgagccaggatttactgtgaacttattgaaaaaagatttaggatttgcagttgacttagctaaggaaagcgaactccatttaccggtaagcgaaatgttattaaacgtatatgacgaagcgagtcaagctggatatggtgaaaacgatatggctgctttatataagaaagttagcgagcaattaatttctaatcaaaaataaattatacaaaggagagaatacaatgattacaactgaaattaaacgagtaaaaaatcacattaacggtgagtgggttgaatcgacaggtacggaagtagaagcagttccaaatccagcgactggaaaaattatcgcttacgttccactatctccaaaagaagatgttgaaaaagctgttgaagcggcaaaagcagcattcgaaacatggtctaaagtaccagttccaaatcgttcaagaaatttatataaatatttacagctattacaagaaaataaagatgagcttgcaaaaatcattacgctagaaaatggtaagacgctaacggatgcaacaggtgaagtgcaacgtggtattgaagcggtagaacttgcaacatctacgccaaatttaatgatgggtcaagcacttccgaatatcgctagcggaattgatggatcgatttggcgctacccaatcggagttgttgctggtattacgccatttaacttcccgatgatgattccgttatggatgttcccacttgcaattgcttgcggtaatacattcgtattaaaaacatctgaaagaacgccacttttagcggagcgacttgtagaattattctatgaagcaggtttcccaaaaggcgtattaaatttagtacaaggcggaaaagatgttgtaaatagcattttagaaaataaagatattcaggctgtttcgttcgttggctctgagccggtagctcgttacgtatatgaaacaggtacgaaacacggaaaacgtgtacaagcgttagcaggtgcgaaaaaccatgcgattgtaatgccagattgcaatcttgagaaaacagtacaaggtgtaattggatctgcatttgcaagtagtggagagcgctgcatggcatgctcagtagtagcagtagtggatgaaattgctgatgaattcattgatgtattagtagcagaaacgaaaaaattaaaagtaggcgatggctttaacgaagagaactatgttggaccattaatccgtgaatctcataaagagcgcgttttaggctacattaatagcggtgtagcagatggggcaactttattagtagatggccgtaaaattaatgaagaagttggagaaggttactttgtaggtgcgacaatctttgatggcgtgaatcaagaaatgaaaatttggcaagatgagatttttgctccagtattaagcattgtacgagttaaagatttagaagaaggtattaaactaacaaatcaatctaaatttgcaaatggtgcagttatttatacatcaaacggtaaacatgcacaaacgttccgtgataatatcgatgctggtatgatcggtgtaaacgtaaatgttccagcaccaatggcattcttcgcatttgcaggaaataaagcgtcattctttggtgatttaggtacaaatggcacagatggcgttcaattctatacacgtaaaaaagttgtaactgagcgctggttttaatataaaataaacagccaaattagttattaaatgaaaaccaccactattaatagtggtggttttcatcttgttaattacttttttcaaaagcaagtttaataccaaaaccaattaagaagactcctgttagcccttgaatataacgttgcgtcttcggttttttcataaaagcactaattttatcaattaaaaatatataaaaagcgaaccaaatggctgttaaaacgaggtaagtaaggcccattacgagtagttggataaacgtattatgatttggatttaaaaattgcggtaaaaacgttaaaaagaatactgcaactttagggtttaataaattcgtaagaaacccttgtcgaaagcaagaggtgtgttcatcttcattattcaaagatatatcgttcgtatcaatgccttctttatttcttactgctaaaagggctttaataccaatataaattaaatatagagccccaacgtacttgaaaatagaaaataaaagagctgactttacaataagtgcagaaagaccaattacagcagctaaagtatgaattaatagtgcaatacatgtaccaaacactgttttcactccaccgactttaccagcaaccaatgtatttttcgtagccattgctgtatctggaccaggtaaaatgataaggcaaatagacataatgatgaaaagaagataattttctatcatagccgcccctcctttttatttttagaatatttgattaaaatcagtgtagcacaaaaatggatttaataaaattaaattttgttaaaaataattaaataaaaaaggctatatagtagctgtaattacactactatatagcttcgattttataccgctatttgcgggtagtaagattttcaccgcacaagatttagctgaagcaaagaagttaggtaggggatgaacaaaacatcccctcatgacaatttcattttatgcattaagtaagttaaagaaacgattcacatcttcttctgaaacgtcacttaactgtttatatttataattcggattttgatctttatcaacgacaacggagcgtactccctcaaagaaatcttcatgtctcatgaaatttttagcaagtataaggtccgtagcgaaacattcttcaacggatttatcttttccatcaataaactgttttaatgttacttttagtgaaataggggattttgataacagtgtttctttcgtttttagagcaaaggaactttcatctttctccaatgaatggatgatttcttccattgtatcgaaagcaaaatgtgaattgattacttctaatgaaggagcaagctcgctttctaagtttggagcagttgcaaatgtacgaataacttcttttaaattagtatgtacatcatcttctttatgccaatttacactttcaagttcagtaagaaactctggtaatgaatcagatgtcataaagtaatcagcagcattaataaataatacgtcagaagcttttaaaatagatgctgttaaagcaacgaatcgtcctgtatatccaggcgctttatttaagaaatgtgcagctccgacgtctgggaagaagccaatattcatctctggcattgcccatttcgtacgctcagttacaatgcgatacttcgcaccatttgtaagaccgacaccaccgcccattacaattccatctaaacaagcaataatcggttttgtatattgataaatatatgtatcaatttcatactcttcttcaaaaaaacgttctgcatgttgcaatgccacttcattggaacgcgcttcataaagagttttaatgtcgccgcctgcacaaaaaccttttgtgccagctccttttaacacgataagtgcaatacgctcatcgtgttcccactctttaagtttttgtccgataggttgtaacatgtcataagataaagaattaagtgcttttggacggtttaaagtaattgtcgcaacgccgttttcactaacagaaaataaaacttgttcagtcataatgcatcctcccttacatatcttcttattcttaattcttgatatgtactgaaatgtcctttataaattttgtcaaaagttgacggtaaatattaatttggtcactgcatattttgacgagttatctttgcaggatttcagagactgagggggaatattacaacattactgtaagtgtaattatttgaagttataatgataaaagcgctattatataggtgtgaaatgttcattatcaattctaaaagtgtgtttgaagaaaaaataaatcgtacaattgtaataaaaaattttacactgaattagaaatagagaaaggagaaatcggaatgccaggacctttactattgtcggttattattttgtcttttttaatgataggaataacgcagtattttcatcatacagatacgacagaagaagtgaaggataaagtacgtctcgtatttccgatttttataatatctatttcattctgtattttattaaataaagatggctacattgtcgcagtgttctcatttttcgtcgcaatcgttttaattaccgttttatattatgtaatgaaagactttatacaaaaataaaggtgtcataataggcatttttattttggagaaaatataaaatttcacataccgtattttatataaaatacatgaagtatataacaatagaaaagtgtgtactttgctgtgtatgtacttgtcaatcttgcatagccactatactattaaaatgtagagattataaaaaggggttgtatctatcatgaaatttgagatgcacacaaaaattatttcaaatgaaaaagaagtaagattacatattgaagaaaatatatttcaattaatattggatggttatcacttatttacagttcaagaaatattgcctttatataaatcaaatgaagaaagaattggaagtgcaacgatattgaagctagagtgggagaacggaaaaactacaataaactatcaactcgtttcactaaaatcagtaaattaaaaggagtagaaaaatatgaagttatttcatacagcggattggcatttaggtaagcttgttcatggcgtgtatatgactgaagaccaaaagattgtattagatcagtttgtacaggctgttgaagaagaaaaaccagatgctgtaattattgcaggggatttatatgaccgagcaattccacctacagaagcagtagacttattaaatgatgtgctgcaaaaaatagttattgatttacaaacaccagttattgcggtagctggtaatcatgatagtccggatcgtatccattttggaagtagtttaatgaaaaaacaaggattacatattgcaggtcaatttcaattcccgtatgaacctgtcgtactaaatgatgaatatggagaggttcacttccatctaataccgtatgcagacccaagcatagtaaggcacgtgttgaaaaatgaagacgtacgttctcatgatgatgcgatgcgcatttttatgaatgagctctctgaaacgatggataaagaagctagacatgtatttgttggacatgcatttgtaacttcttcaggagaagcggaggagaatacaagtgatgcagaaagaccactttcaattggtggtgctgaatatgtaaatagtcattattttgataagtttcattacacagcgcttggacatttacatcaagcgcatttcgtacgtaatgagacgattcgatattcaggttcaccacttgcctattcaatttctgaagagaaacataaaaaaggttattacattgtagaactgaatgaaactggtgaagtagcaattgaaaaaaggttactttcaccacgtcgtaaaatgcgaacagtagaagcaaaaatagatgaattattacagcacccagcaagtgaagattacgtatttgtaaaattattagacgaaaaccctgtcttacagccaatggagaaaatacgatctgtatatccaaatgcaatgcacgttgaaagagcgatgcaaagacgagaactcacagatacaaatgaagtaactgtttcaagacataaaacggatgatttatctcttttaaaggctttctataaagaaatgaaggggttagatttatcagaagagaaagaacgcctatttatagatgtattacaaacagtgcaagaatgggaaggtgaacgaggatgagaccgattcagcttattatgacagcattcgggccatataaacagaaagaaataatcgattttgaagatcttggagaacatcgtattttcgctatttctgggaatacaggagctggaaaaacaacgatttttgatgcgatttgttatgtgttatatggtgaggctagtggagaagaacgtagtgatacgagcatgcttcgaagtcaatttgctgatgataatgtttatacaagtgttgaattaacctttcagttaaaagggaaacgctatgaaataaaacgacaacttggacataaaaaacaagggaataagactattacaggacatgcagtagaattatatgaagttattgatggagaaaacgttccagccgtcgatcgttttcatgtaacagacgtaaacaaaaaagtggaagatttaattgggttaagtaaacatcaatttagccaaattgttatgttaccccaaggggaattccgaaaactattaacatctgagacggaaaacaaagaagagattttacgtcgtatttttaaaacggatcgttataaattaatgcgtgagttacttgatcaaaagagaaaacaatggaaagacgtcttacaagaaaaacaaaaagagagagagctctatttccgtaatgtttttaaattaccaatccgtgatggagcattattagagacattagtggcacaagaacatgtaaatacgcatcaagtagtagaagcgttagaacaagaaacaaccgtgtataaggcagaggttgagcaattacaagtagaacaagatgttcaaacgaagcaattaaaggatgcagaaacacgttttcatgcagcaaaatctgtaaatgagaaatttatagatttacaacaaaagaatgagaaatataacactttacaagagaaccgtgcagcaattgaaaggaaagaaaaattctttaaacgtgcggaacaagcaaagcgcttattaccatttgaacaatggtatgaagaagcgatggaaaatgagcagaaagctgaaagtttgttaaaacagataatcgtcaaacaagaacagataatgaatagctttgaacttgctcaggagaagtatgaagtagtaaagaataaagaagctgaacgagaagaggctaaaaaacttgttcaaagattagaagagttacaagcgatcattgaatcattagctgagagaaagctgaatttacaaaatgccgaaattcaaatagggaaattaaaagaaagtatgcaaaagttagatcaacaactagaagagcatacaaaccaaaaacagagaatgtgtgatgaattgcagcaattagaacaagcacttgagcaatatgtagctaaagtggaagaactaacgaatatgcgagaagatgcaaaagttttaaaacaagcatatgatgtttggcaagaaaaacaaaaattcgagcaagaaaaagaagcggtaaataataaaatgcaagtggcagttcgtgcatatgaaaacatggagcgccgctggttaagtgaacaagctggtatattagctcttcatttacatgacggtgaatcttgtccggtatgtggtagtacgaatcatccacaaaaagctacagagcaaagtaatgcgatcgatgaaaaagagttaaacgatttaagagataagaagaacattgctgaaaaattacatgtgcaagtagaggagaaatggaatttctatcaactacaatatgaacaagtgatagaagaagttgtgaagcgcggctacaactccgaaaaattagttgaaacatatagtgcacttgttcaaaaaggaaaacaattagcagcagacgttaatacgttaaaagcaagtgaagaaacacgtaagcagattgctgcgaacatgaaaagcgtagaagaaaaaatagaagaacttcagaaacaaaaacgagaagtggaaacaatgcagcaccgtacagaaatggagtgtatgcaacttcgtacgtcatatgaacatgataaacgaaatattccagaaagcttacaaacagtacaagcttgggaagcgcagtttaatcaagctatgcaggaacttaggttaatggaggacgaatggaagaaagtgcaggaagcgtatcagcattggcaaaatgaaaatatacgtattcaagctgaacaaaaaggtgcttctaatcaatttgaaagtgcaaaattaaagaaagaagagacttttgcacgctttatgaaagagctagaacaaagtgggtttacagatcaattcacgtataaagaagccaaattaagcgatgccgagatggagatgttacaaaaagaaattcaaggttattattcatcgcttgaagtacttgcaaaacaaattgaagagttaaacgcagaattaaaagataaagagtatatggatattacatctttaggtgaacacataaaagatctagaaattaatcttgatataattaaagaaaaacgtcaacgtgcgcaaaatgcggtaacatatatttctgatttacatgaaaacattagacgtattgacgaacaaattcacgaggaagaaaaagccttccaagaacttgttgatttatatgaagtaatgaaaggtgataacgaaagtcgtatatcatttgaacgttacatcttaattgagtatttagaacaaattgttcaaatcgcaaacgaacgactacgtaaattatcaaatggacaattttatttaaaacgaagtgagcgagttgaaaaaagaaaccgtcaaagtggattaggtttagatgtgtacgatgcatacactggccaaacacgcgatgtaaaaacactatccggtggagagaaatttaacgcatcactttgcctagcgctaggaatggcagatgtcattcaagcatatgaaggtggtattactatcgaaacgatgttcatcgatgaagggttcggttcattagatgaagaatcattaacgaaagcagtagatgccttaattgacttacaaaaatcaggccgatttatcggtgtcatctcacacgttcaagagctgaaaaacgcaatgccagctgtattagaagtaacgaagcaaaaggatgggtgtagtcagactaggtttgtggtgaagtaagcttagaaaatggagtagggaatctaccgatacttttagtgtcatatgtatgaataataaaacgtcgtctcttcatattggaggcgacgttttattttataaaatatctatgaattatctgtagaaggcggcgtattctccaaacgattataagttttaaaggctgaaattgctgagataaccccgcctactaaaaataaagcggatcctccaactaagatgatacgactgacatatgtttcccgtgcttcttcgacttcttcttgtaacgctgtaggcatatgaatcccccctttataaaagttgttttataaatagtatatacaaacgcctaaaatgtgttaaaataactgatgattttatgcagtgggtaattagatgagtaggatgcgagtggctaagtaaatcttcatcataaatttatgtgaacttcacatagagcacatattaacattgtattatgtatatgtaccaaataaataaataaagtgaatgtaagttctgttttcaaaaatttaaaatccttttatttctatatgaaagttttaatcaagggttttaaaaaatttggaaatagatcttatgaatatggaattcatataaaaggggaatgtcttatgacaacatatacgagtgaaatgagaaaaactttagtttcagaagaagatgtagatattttaaaaattatggcgcatccaatccgactgcaaattgtaaatgaattaagtacgagaaaaacttgtaatgtaacacaattaacagagttactgaatattccgcaatctactgtttcacaacatttatcaaaaatgaagggtaaagtgttacgagcagagagaagaggtttagaaatttattatcatattaacaatttaaaagcgagtaagattgttaatgttttagggtatataaactagtgaaatatttttatataaaatagcccctgctgttgagcaggggctattttgtgttgttttatgtatttgtatttaaaactttatagtttttatgatttacaattgttcgatcaaattcaaaagtaccaccgcttacatttgtaatttcaactaagaccgattcagtataaagttttaatacagatcctgtaatctttaaattatttcgttgaaaaagtatagtatcccctacgtttgctttcatagtacctcctcattaaagacagaaatatttttttattatatatattaaaccacggatagatatattagtgaatatttagttttatttattggaaaaaaatttgtgattttataaaaaataaggtggattgaagtataaaaaatttttctattgtatttaatcagtagttttttgtatttcatccttcgttttttgtaactgattccatgtttttgacgctctatcttgtaagtgcttacataaacaaaaacatcttatacaatgaaggtgtcaaatcaaaagaggtgaccaaaatgaacataaaaaaagtaaatttagcgaatagcattgaaatagaaagaggaggcggaaaggtatgaaaaaatcaactgttaatccatggcttgttgtccttggcacagttatagtacaaatggggcttgggacgatatatacatggagtttattcaatcagcctttagttagtaaatatggttggagtcttaacgctgttgcgataactttctcaattactagtctttctttagcattttcaactttatttgcgagtaaattgcaagaaaaatggggacttcgtaaacttattatgatagctggattagcattaggactaggattaatacttagttcacaagcatcctcactaatattactttatgtactagcgggagttgttgtaggttatgcagatggtacagcatatatcacttcactatcaaatttaataaagtggtttccagagcgtaaaggtttaattgctggtatttctgtctctgcatatggttcaggtagcttaatctttaaatacgttaacgcacagttgattgaatcagttggtgtatcccaagcatttatatactggggtttaattgttacagctatgattgtaattggtgcttgtttaatccatcaagctgcagatcaaggagcagttcatgaaacaaaaactgaggaatacacaacgaaagaaatgttaggcacaaaacaagtatacttattatttatcatgttatttacatcatgtatgagtggcttatacttaattggtatggtaaaagacattggtgttcaacttgtaggacttagcgcagcaacagcagctaatgcggtggctatggttgcaatcttcaatacgttaggtcgtatcattttaggaccgttatcggataaaattgggcgtttaaaaatcgttactggtacttttgttgttatggcgagttcagtcttagttctaagttttgtagatttaaattatggtatttacttcgtatgtgtagcaagtgtagcgttttgctttggtggaaatatcactattttcccagctattgttggtgatttcttcggtatgaaaaaccatagtaagaactacggaattgtgtatcaaggatttggatttggggcgcttgcaggttcctttatcggtgcacttctaggtggattcaaaccaacgttcatggtaataggtgtattatgtgtcgtgtcattcattatcgcaattttaattcaagcacctaagcagaaaaaagaaaaagaagaagagtatcgcagcgtagcataagtatataaatcttctataacaatatgattacgaaaaagcatcctattctattaattaggatgctttttttatgagttattttaacaaggttaaattacttttatgattttcatagatgtaaaagtgagtgaaatgcctatttggattatattgaaatacaataaattgatacatcgtattcgaaatatatattaaatcttaaatgacaaaaaagacattcattagtatttgtaagatatattttcagaaaaatattgagaaaatatatacttgagtttttcataaagcattgtaaatgaacgtatctctagtttagtttcttcaattttaaaaagaggactttgaattttatttataatataagtacttttaatgcgtttacatatgattttattaagaagcattaaaatggtttatctgaaaaataaaaaaagattgacaagtttattgagaaacattatcatttcggtgtaagatggtaaatgaaaaacattatcaataaaatggattttaaagtaatgcgcacttgaccaattagtttagtaagtgtattattttttacaacacaactgataatgaaaatcaatatcatcggtgttacttaatgaaattaatgtttatgtgaaaggatagagaaaatgaacttaggggaatttgatgggaaaacagttttagtaacaggtgcagcacaaggcataggcagtgtcgttgccaaaatgtttttagaaagaggagccacagttattgcggttgatcaaaatgaagaggggttaaatgtactcttaaatcaaaatgaattaaacaatacacgtatgaaaacgtttcgtttagatgtgagtgatagcgccgctgctgaagacatggtaaatcatattgcaaatgaaatagcgccaatagatattttaataaatgttgcaggggttttacgtatgggaccaattcattcgttaagtgatgaagattggaataaaacattctctgtaaatacgacaggggttttcaatatgtcccgagcggtaagtaaaaatatgatgttaagaaaatcgggggcaattgttacagtcggttcaaatgcggcaaatacgccaagaatggagatggctgcgtatgctgcgtcaaaggccgcaacgacgatgtttatgaaatgtttaggactagagcttgcggcatacaatatacgctgcaacttagtttctccaggttctactgaaactgagatgcaaagattactatgggctgatgagaatggagctaaaaatataattgctggttctcaaaatacatatagactcggaattccattacaaaaaattgcacaaccttcagaagttgctgaagcagtgttatttttagcctcagatagagcaagtcatattacaatgcacaatttatgtgttgatggcggtgctacgttaggagtttaataaaaattcaggaggttattatattatgaatgaacatatagctgtaaaggaattgtcagaaaaacttttagaagattataagactgaatcttcattctttttcgcttcaccaactcgaacgatattagcagaaggagagtttactacagtaaagcatcgtgaaattgaaagtttcccagagcttgttcaagcgaaattaagtaatgcgaaacaagctggaaatccaaatcctatcgttgtgggtgctttgccatttgatcgtagaaaagaagtccaactcatcgtaccagaatatagcagaatttctgagcgtttacaattggatacaacaaatcagcttgaaacaaatgagaatgtaacatttgaaatgacaccagtgccagaccctgaagtatatatgaatggtgtgaagcaaggaattgaaaaaatacaggacggtgatttaaagaaaatcgttctatccagatcgttagatgttaaatcttccgaaaagattgataagcaaaaacttctgcgagaattagcagagcataataagcatggttatacattttctgtaaatttaccgaaagatgaaaaagagaacagtaagacgctaattggagcaagccctgaattacttgtttcacgtaatggtatgcaagttatttctaacccgttagctggttcaaggccacgtagtgaggacccagtagaagataaaagaagagcagaggaattactttcttcgccaaaagatttacatgaacatgcggtagtagttgaagcggttgccgctgcacttcgtccgtattgtcatacattacatgttccagaaaagccatcagttattcatagtgaagcgatgtggcatttgtctacagaagtgaaaggtgaacttaaggatccaaatacttcttctttacaattagcaattgcccttcatcctacgccagcagtttgcggaactccgatggaaaaagcaagagaagctatacagcatattgagccatttgaccgcgagttctttacaggaatgctaggatggagcgatttaaatggagatggagaatggattgttacaattcgttgtgctgaagtacaagaaaatacacttcgtttatatgcaggagctggagttgttgctgagtcaaaaccagaagatgagttagcagaaacatcagctaagttccaaacaatgctaaaagctttagggttaagagatagttcacttaatgaaaaatagggggaagaaagaatgctagtaggttatacagaatggccaaaagaatttgccgatcgttaccgagaagcaggatgttggcttggtgaaacatttggaggagtgttaagagagcgggctgagaaatatggagatcgaatcgcggttgtaagtggtaagaagcatataacatatagtgaacttaataaaaaggtagatcgtttagcagcaggtttactgaatttaggaataaagaaagaggacagagttgtaatccagttacctaacattatcgagtttttcgaaatatgttttgcactatttcgaattggagcgcttcctgtctttgcactaccttcacatcgaagcagtgaaattagttatttttgtgagtttggcgaggcgagcgcttacgttatttcagataaggctctcggttttgattatcgaaaattagcaagagaagtgaaagagaaagtgccaactttacaacatgtaattgtagtgggagaagaagaagagtttgtgaacataaatgatctgtatatggatcccgtctcattaccagaagttcagccaagtgatgttgcatttctccaattatcaggaggcacaacaggtctttctaaattaattcctagaacacatgatgactatatttatagtttacgtgttagcgctgaaatttgtaatttgaatgcagaaagcgtctatatggcagttcttccagtagcacacaattacccaatgagttctccagggacatttggaactttctatgcgggtggaaaagtggtattggcaactggtggtagtccagatgaggcctttgctcttatcgaaaaagaaaaagttacaattacagcgctcgttccgccattagcaatgatttggcttgatgctgcatcttctcgtaatgccgatttatcaagcctagagattattcaagtaggtggtgctaagtttagcgctgaggttgcaaaacgtatacgtcctacatttggatgtacgttacagcaagtgttcggtatggcggaaggattagtgaactatacaagattagatgatccggaagaatttattatttatacacaaggtagaccaatgtctgcactcgatgaagtacgagttgttgatgaaaatgacaacgatgtacaacctggcgaagtaggtagtttattaacaagaggtccatatacaattcgtggttactataaagccgaagagcataatgcacgatcatttacaaaggatggattttatcgcacaggtgatcttgtaaaagtaaatgaacaaggatacatcattgtagaaggaagagataaagatcaaattaaccgcggtggtgagaaagttgctgcggaagaagttgaaaatcatctattagcacacgatgcggtccatgacgtagcaattgtatctatgcctgacgattatttaggtgaacgcacctgtgcttttgttatagctcgcggacaagttccagcagtaagtgaattaaaaatgtttttaagagaacgtggtatagcggcttataaaattccagatcgaattgaatttattgaagcattcccgcaaacaggagtcggaaaagtcagcaaaaaagaactacgtaaagtcattgctgaaaagcttattacagtaaaacaataataaaaaccggaaggaagtgattagatggctatcccatctatttcagtatataaaatgccaattgaatcagaactaccaaaaaataaagtgaattggacgccagatccgaaacgtgcagtacttttaattcatgacatgcaagaatattttcttgatgcatatagcgataaagaatcaccaaaagtagaacttatttcaaatataaaaatgataagagaaaaatgtaaggaacttggtataccagttgtttatacagcacaacctggtgggcaaacgttagaacaacgaggtttattacaagacttttggggtgacggtatacctgctggaccagataaaaagaaaattgttgatgaacttactcctgatgaggatgatatattcctcacaaaatggagatatagtgcatttaaaaagacaaatctattagaaattttaaatgaacaaggaaaagatcaactcattatttgcggtatttatgcgcatattggctgtcttttaacagcttgtgaagcatttatggatggtatagagccgttctttgtagcagatgcagttgctgatttttcactagagcatcataaacaagcattgaagtatgcatctaatagatgtgcagtaacgacatcaacaaacctactgttaaacgatttacaaagtgtaaaagatgatgagagtgaaggaatcactatacaggaagtgcatgaactagttgcacaactacttcgtgagccagtagagagtattgatattgatgaggacttattaaatagagggcttgattcggtcagaattatgagtttagtagagaagtggcgtcgtgaagggaaagaaatcacttttgcacatttagcagaacgtccaactgttgcaggttggtacagtttactatcttcacaaacagcacaggtgctgtaacaaatagactacataataaaggggtagtaaagaatgcctaacagtcaaaagattcgtcattcgttatcatctgcgcagtctggtatgtggtttgcgcaacaattagatccgcttaatccaatttacaatactggggaatatgtagaaataaacggaaatattcatcaagaaattttcgaattagctgtacgtaaagttgtaatggaagcagaagcacttcatgttcgcttcgaggaggatgaaattggcgcatggcaagttattgaagaatcacagtttcatatgcattttattgacgttcgtaaagaagaaaatcctgaagaagctgctaaagtatggatgaaaaatgatttatctatgccagtcgatttgaaaaaagatacattatttactgaagcacttattcaagttgaaaataatcgtttcttttggtatcagcgcatccatcacattgtgatggatggctatggattttcacttcttagccaaaaagtggcgaatgagtatacatcacttatagaagaaacaaacaagaatgaaaagccgtttggttctcttacaaaagtcgtgcaagaagatattgagtatcgtgagtctaaaaaatttcaggaagatcgtactttttggttagaaaaatttgcggatgaaccagaagttgtaagcttggcagagcgagcaccgagaacatcaaatggattttcacgagaaacagcttatttatctagttctagcacgaaaactttattagaagatatcaatatttcgttaacaagttggccggaattcattgtcgctgtaacaagtatttatatgcataagttaacaggtgcaaatgatattgttttaggtttaccgatgatgggacgtctaggttcggtatctattcatacaccaagtatggtaatgaatttagtgccacttcgtattacagtaactccaaatataactcttgcggaattattgcagcaagtttctaaagaaatccgagatgtacgtcgccattataaataccgtcatgaggaattaagaagagacttaaagttactaggtgaaaatcaaaggttgtttggaccgttagtgaatgttataccttttgattacgggctaaattttgctgggaatcgtggtattacgcataatttatcagcaggacctgtcgatgatttatcaataaatgtatataaacgttttgatcaaaatgagctaatgattcattttgatgcaaatcctgaagtatataatggcgcggagctagcattgcataaagaaagatttatgagtctatttgaattagtagtaaataattatgagaaaaacgagtcgattggaaaaataaacattactctgcctgaagaaaatcataaagttttattggaatggaatgaaacgaaggaagacgatgagttaatcagtctgcctatatcatttgaaaaacaagtgcaaaaaaatcccaataaactagccattacttgtgacggtgtaaaccttacgtataaagagctaaatgaacgagcgaatgaactagcacattatttagtagaagaaggaatacgaccaaaccaatttgtagctttagtattccctagatcaatagaaatggtagttagtatgctagcagtcttaaaggctggtgcagcgtatttaccaatagatccagaatacccagcagaaagaattaattatatagtaaatgatgcaaaaccagtttgtatcataacatattcatctgtttcatctaagttagttatagaaaatgatatgaaaaaaattgtattagatgaagaagaaacgaaactagcgttacatacatattctcgtatgaatatagcatgtaagaatgatgtatcacttttaaacccagcctatacaatatatacttcaggctcaacaggaaacccaaaaggtgtaattgttcctatgagaggtttaagtaactttttaatggctatgcaacaaaagttttcattaaatgaaaatgatcatttattagcagttacaacgtttgcgtttgatatttctgctctagaaatttatttacctcttattagtggtgcaagtttaacaattgcgcaaaaagaagacatacaagagccatcagcattaacgacacttttacaagaagaaagagtgaccattatgcaggctacaccgacgctttggcaggcgttagtaactgattatccagagaagctacaagggctaaatatactagttggtggtgaagctcttccagcgcatttagcaaataaattaaaagaattaggttgctcaataactaatttatatggaccaactgaaacgacgatttggtctacttttatgaacattgatgaaggtgaaaagggtatacctcctattggaaagccaatttgcaatacagaagtgtatgtattggatgcagggttacaaccagttccacctggagttattggggaattatatattgcaggggagggacttgcaagcggatatttaggaaaacctgagttaacagctgaacggtttattgcaaatccttatggagaatcagggaagcgcatgtaccgtacaggagatcttgtgaaatggcgtagtgatggtgcgttagagtacattagtcgcgcagatcatcaaattaaaattcgtggattccgaattgaattagctgaaattgaaacggtattacaacgacatgaaaatattcaacaagcggtagtaatggtacgagaagatcgtccaaatgataaacgcatcattgcgtatatcgttgcagaagaaaaggaaccgattaatctttcagaaattcgttcttatgtttcagaaagtttagcgaattatatgataccatcggcatttgttgtgctagaagaattaccattaacgccaaatggtaaggttgacagaaagaaattacctgctcctgattttaatggaatgcacaatgagagagttgctagaaatccgaaagaagaaatattatgtgatttatttgcagaagtacttggtgtttctcgaattagcattgatgataatttctttgaaatgggtggacattcacttctcgcatctcgtttaatggcaaggattcgtgaaacgttaagtgtggaattaggaatcgggaaactatttgaatcaccaactgttgccgaactggcgaaacaattaaacgatgcaaaaagtgcaagaccagctattcagaaagcaagtaggccaaatgaagttccactttcatttgcacagcgcaggttatggttcttaaattgtttagaaggtccaagtcctacttataatattccgctagtcattcgtatgaatggaatattgaatcgggaagcattacaaggtgctttttatgatgtagttgagaaacatgaaacacttagaacaattttccctaacgtattaggtagttcctatcagagaattttagatatggaaaacttaaatctagaaatggttataactaatacatgtaaagatgaattagaaagtgtactttcagaggcggtaagatatagctttaacctcgattttgagccggcagttcgtttacaactttttacagtgagtgaaaacgaacatgtattattaattttattacatcatattgtaggtgatggctggtcattacagccgttaacgagagactttgcagcgtcgtataaagcgcgatgtcaaggtgacagagttcagctggagacactaccagttcaatacgcagattatgcactttggcaacagcaattgctaggtgatgaaacgacaccagagagtcttatttcaacacaattagatttttggaaagaagaacttaaaggtttaccagaccaaatggagttacctacagatttccagcgtccaattgagacgagttaccgcggggaaacaattcattttcatatagatgaaggtatgcatagtaggttagtagagcttgcacgtaaaaatggagttagtttgtttatggtattgcaagcagggcttagtgcactatttacaagattaggtgcaggcactgatataccaattggaagtccgattgctggaagaaatgatgatgtactttcagatattgttggtttatttgtaaatacattagtgttacgtacaaatacgtcaggagatccaagttttaaagaattattaaatagagtgaagcaggtaaatcttgcagcttatgaaaatcaagatgttccatttgaaaggcttgttgaagtgttaaatccagtacgtactcgaaacagccacccgttgtttcaagttatgttagcttttcaaaatacaccagaagcaacgtttcatgtaccaggtttagaagcgagccttgaaattcaaagcgtcggttctgcaaaatttgatttaacatttgaaattagtgagagtaacggggttgatggtactccgaacggtttacatggattactagagtttagtaccgatttatataaacgtgaaacggttcaaaaactaatagaacgattcattttgttattagatgatgcagctacaaatccggatcaatcaattggcagattagaaatattaactgtagcagagaaaaatacagtgttagaaaagtggaatggtggttttcaaattgcaccagaaatgacattgccacaattgtttgaaaagcaggttcatataaatccaaattctattgctgttgtctttgaagataagaaattaacttataaagagttaaatagaaaagcaaataaaatagctcgattcctaatagcaaaagggattggtcctgatcaactcgttgctttagcgatgccaagatcattaaacatggttgtaagcttattagctgttcttaaagctggtgctggataccttccgttagatccagattacccagcagaccgcatttcatttatgctacacgatgcgaaaccaacatgtgttttaacgaattcagaagtggaatttgaatgtgatgaggcactaaaagttttagttgatgatgtaaaagtaatagcagaagttgagaaatatagtgaagaaaatattgatgaagtagaacgcattaagccattatctccatcacatattgcttacgttatttatacgtcaggctcaacgggtagaccgaaaggcgttatgatacctcatcaaaatgtagtaagacttttaggagcaactgatcattggttccagtttgacggaaacgatgtttggacgatgttccattcatacgcttttgatttctctgtttgggaaatttggggacctttattatacggagggcgtttagttgtagtgccacatactgtaagtcgctcaccgaaagaatttttacagcttcttgttaaagaaaaggttacggttttaaaccaaactccatcagcgttctatcaattgatgcaagcagatcgtgaaaatgaagagattggccaaaaattatctttacgatatgttgtttttggaggagaagcacttgagctaagtcgcttagaagattggtatagtcgacatcctcataacgcaccaaagcttattaatatgtacggtattacggagacgacagtacatgttagttatattgaattagatgaaactatcgtctctttacgagcaaatagtttaattgggtgcagtatacctgaccttaaagtgtatgtgttagacaactatttacaaccagtgccacctggagtagttggagaaatgtatgttgcaggtgcagggcttgcgcgtggatatttaggaagagcaggattaacggctgaacgctttatcgcagatccatttggcaagccaggtacaagaatgtatcgtacaggagacttagctcgctggcgtaaagatgggacgctagattatataggacgtgcagatcatcaaatcaaaattcgtgggttccgaattgaattaggagaaatagaagcagtcataatgaagcaccctaaagttgagcaagtagccgttattgtacgggaagatcaaccaggggataaacggttagtttcttatatcgttgcatcaaataatgaagcgattgatacgaatgaaatgcgtcagtttgctagtggtagtttaccagattatatggttccatacgcttttgtagtagtaaatgagttacctttaactccaaacggtaaattagatagaaaggtattgccagctccagaatttatcgcatcatcttctagtcgtggtccaagaacaccgcaagaagaaatgttatgtgacttgtttacagaagtgctaagtgtacctcaaattggaattgatgacggattctttgatcttggtggccattcactccttgcagtgcagcttatgagccgcatgaaagaggcgcttggagtggaactaaatattggcactttatttgcagcaccgactgttgcagggttagctgaaagacttgagatggggaatggtcaaagtgcacttgatgtgttgcttccattacgagcaagcggggatcaattaccactattttgtgtacatccagcaggtggattaagttggtgctatgcaggacttatgaaatctttaggaacagattatccaatctatggtgtacaagcacgtggtatcgctaaaaatgaagaacttccaaaaagtttagaggagatggcggcggattacttgaaacacgttcgtgaagtacagcctcatggaccatatcgtttattaggttggtcgcttggaggaaatgttgtgcatgcaatggcagcgcaattacaaaatgaaggggaagaagtagaattactcgttatgcttgattcttatcctggacacttcttaccgaatacggaagcgcctactgaagaggaagcgttaatcgcattacttgctttaggcggatatgacccagataacatggatggtaaaccacttacaatggaaagtgcagttgaaatccttcgtaaagatggaagtgcattagcaagtcttgaagaagagactatattgaacttgaaagaaacatatgtaaattcagtagggttgttagggaaatatgtaccgaaagtttataacggagatatcttattctttagatctactgttataccagactggtttgatcctatttctccaaatacgtggttaaattatttagatgggcaaattgtgcagcacgatgttgattgtagacataaagatctatgtcagccaggtccacttacggaaattggacaagtattagcgaaatatttgcagaataagaaaggggtaagtagagtatgacgaatccatttgaaaatgataattacacatataaagtattaataaatgaggagggccagtattctctctggcctgcttttctcgatgtacctattggctggaatgtcgtatatgaagaagctagtaggcagagttgcttagaatatgttgaatataactggaaagatttgaatccacaaggtaatcaagttcgcgaaaaaacattagtaggaaaacgataatgaaagaaaaactaaatccaaaagtagttgtaagtatcgtttatataactgcgatgtttatggctgcgatggacgcaacgattgtaaatgtagcactgcaaacgataagtagagaactacaagtacctccatctgcaatggggacggtgaatgttgggtatttagttagtttagctgttttccttccgatttctggttggttaggagatcgttttggtacgaaaagagtatttttaattgctcttttcgtatttacaattgcatctgctttatgcggaatggctaacgatattacttcattgaatattttccgtattattcaaggtgctggcggagggcttttaacaccggttggaatggcgatgttatttcgaacattttcacccgaggaaagaccgaagatttcccggttcattatacttccaattgctgtagcaccagcaattggtcctatcatcggtggtttctttgtagatcaaatgtcttggcgttgggcattttatattaatctaccgtttggaatcgttgcattgctatttggacttctatttttagcagaacatgttgaaaaatcagctggtcgctttgattcgctcggctttattttatcagcaccaggatttgcgatgctcatatatgcactcagtcagggaccatcaaaagggtggatttctccagaaattatgagtactgggatagctggggttgtattcattacattgtttataattgtagaactgaaagtaaagcaaccgatgttagatttacgcttattaaaagaaccagtctttagaaagatgagcattatatcattattttcatcagctggtttattaggaatgttatttgtttttcctcttatgtatcaaaatgtgataggagtttctgcactggaatcaggacttacgacatttccagaggcgattggattaatgatttcttcacaaattgtaccatggtcatataagaaattaggagctcgaaaggtaatttctattggattaatatgtacggcggttatatttgttttattgagttttgtaaatcacgatacgaatccgtggcaaatccgggcattattgtttggtatcggtattttcttaggtcaatctgtcggtgcggttcaattttctgcctttaacaatatcacgccgccttctatggggagagcgactactatattcaatgtgcaaaatcgactaggttcagcaataggagtagcgtttttagctagtatactagctgtttttggaggtaataacgttcaatccgattttttaccatatcaagcagcattaattgggtcagcaatatttttgctcatagcactactattttctttacgtatttccgataaagaggtaatgtcaaagaagaaagaaaaaacattatctgtatcagaaaaagagaaagtacttgtcaatgaataacaatatacgtatgcttttttatgaaaattgatattcgttgaataaaggagagtttacatgatagaaagtaaagttgtagattctattccaactttgaatgagaatgattgtcaaatatggtgggcaagaatttcggatttacaatcatggcattacaatttactaaatgatatagagcgagagaaagcaaattcgtatcatcattcggcagatcgagctcgttttataataggttgcgtaataagtagattagttctcggcaagatactttctatgtcaccagtccaagtaccaattgatcgaatgtgctcagtatgtaaattgcagcatggaagaccacaattaccagaaggtatgccgcaattatccgtttcgcattcaggtgagtgggttgtcgttgcatttacaaaatctgcacctgttggcatagatgtagaacaaatgaatccaagtatagatgttatgaaaatggcagaaggtgtattaacagacattgaaatagcgcaagttatgaaactgccaaatgaacagaaaatagaaggttttttaacatattggactcgaaaagaagcggtgctgaaagcgacaggtgaaggactaatgattccaccagtacatattacagtatcagctccaaatgatcctccaaacttgttggtttttaaggatagacaagagttagcaagtaatacaatgatggaagatgtaaggcctagtttagattatagggcttctgttgcaatattcagtaaggaagtgactgaaattacgcaattagacgcggcagcacttttaaatcttaaataaaaaaattacagaagaggtgttcctcatgttagtagcggaaaatagaaagaatgaattcacttataatgtacaagcaattaaaaatattttattttctggagatacatcatccattcatgctttagaaaagcttttaaatgatacagttcagtttgatgttcttgaacaagaggcacttggtagacagtacattccgaaagaagcaaagaatttttttgataaagatggaacatttctttaccgtgtatctaatgttagttataaaggaaaggtgttatctgaaaatctaatttttgcagacacttcgtttttaccggacgcaataaagagtgaattagagagtggaaatattcctgttgaaaagcttatagaaaagatggaagtaagaagaaacgtattatatgaaggatatcagccatctggaaatattattgaattgtttgatggatgttctgttacagcgaatgtgtatccaactagaaagtatcaaattgtaagtaactgcaaatgtgtattttatatttgtgaagtgtatcatgcagagaatataaagcaattacttaaataaaaacaagaaaccagcctataaaatggctggtttcttgtttttatttaacagcttcttttaattctttacctgctttaaatgcaggaactttaccagcggcgatttgaatttcttcgccagtttgcggattacgtcctgtacgagcagatctttcgcgtacttcaaaagttccaaacccgattagttgaactttatctccagattgtaatgcattagcaattgtgtcaaatacggattgtacagctgcagaagcgtccttttgagaaatatcagctgattgagctacgtttttaattaattctgttttgttcatgttttcacctcataaaaaaatttttggaatgaatgttttagtataatagatagtaaagataaagctatcactatgattagaaagaatactatataattatgttaatttcgttgcaagagactgaatcccttctattatttagggattaattaagaatcgatgcatataaaaagctttaatatgaggatgagggggagtatacgaatgatttttcgtgaaaaaaatgagaaggaaagtattttaattcgtcaacatgatcatggttttttagctggagagattgcaaagcatataaaagaagacttttttgaagataaaacatatttaaaagaaacagttgatgcaatatatgagcatgacagaggatggatagagcttgataaagtaccaattttgaatgatgctaaaaatattccatatacatttatggattgtccaagcccattacgttttgctttttatacgattggattgaatgaaattgaaaattctaatccatacggggcattgctttgtagtaaacattttttatcattcccactaaacgaggaagatgaagagatgatgtcattttataaacatgaattagaacgacaaaaaagaattttgaaaacgttaacaaaggaacagtttgcgatgttcgataagcattatagattattaaagttttgtgatgaactttctttatacgtatgtatgaataagcctggtgtcaaaaagaaagatgaaattgacttatttaaagatggttttgaaggaacagaaatgtttaatagtaaagaggagaaacttattcaagctcaatgggtggacgaggaaacaattcggattacaccatttccatttcaaacggaattttatacgtatgtaaaatataaaacgataaataagcatgaaatgaaagaaaaagggattgcaaaggctgatagagaatcagaaatgaagaaacaaaccattcgtttcatacaataaggaggtaatataaattgaaagagtatatattaaaacagtgtgattatcatgcttgggctaatactagattattcaatcgattaaaagagttaccaaactatgagacaatttttaatgagcagatacagagtgtattcccatccattaaggatacttttgtgcatatttatattacagatcaagtgtggttacatatattgcatggtaaaagtatgaatgaagcaatacaagaccgagaagatttacgaaaacaaattgaaactaaatcgttacatgaattagaaaaaatgtttgaaaacatggcaaatcaatataaagagtttttaattacaatacaagatgtgaatgctgtatttgttattgagaatccatacgtagggaaattagaaacttcgattttagaattagtgcaacatgtcgtaaatcatggtacatatcatagaggaaatataacagcgatgattcgtcaacttggtcattcatcgacaatgatggattttgtactgtatttacatatggttaaaaagcagggagagtaatatagtttgtaagaaggagaggctttaattatagaagtctctccttctattttattctgcattcatggtagatcgactgattaaagttttcttaagaagctttattttcttgtaattgcttagcgtattgtacagccttatatgcattgactctaccgtttttccagtacgtacctgtaccactaattttatcagtagtagactcaataatttggcggatttgtgtattgctatatccttgatttgctaaaagagctgcgactcctgcaacatgaggtgttgccatagatgtaccacttaatgattgatacgtgcttcctttatatgttgaatatatatttgaacctggtgctgcaacatctacccagctaccataagtagagaatgaagattttctatctgattgatctgtagaagcaactgcaattacttcgctgtaataagcagggtaattagcttttgtatttccagcatttccagcagctgcaactataacagagcctttattccatgcatattgaacggcttgttgtaatgcagtaccaccatttggagctcctaaacttaaactaattacttttgcacccgaatcagcagcttctcgaataccttgcgctacagcatcaagagtaccacttccttgattatctaatacgcggacagcataaattgaagtttgtggggcaacaccagcaattccgacgctgttattcgtaagtgctccagtaattccagcgcaatgtgtaccatgaccattaccatcatcagatgtattgtcgttatcaacataatcatgcccgtaaattactttcgaagccagatcagggtgtgagccttgaactcctgtatcaataatagctacttttacaccaggatcacttcgttggctatcccaagcttgtggagcttgaatcttttgtaacccgtattgattattaaaatatgggtcgtttggagtccaaaaggcgtgaacgtaataattcggttctgcatattccacatctggattatttttatagctctttattttttcttttacagtaccttttgaaaattgtacgacttcaaaacctaacttatcatctttagataagacattagctccgacagatttatgaaaagattgcacattacttaaagatgcattttgtttgaacttaacgattaattggttaggaacgtaatcagtagatgatgtttcagcgcttgaagtattcgtgttaaagaagaaaccaccaataataaatgacaaaacagataggaaaacgatgattttgtttttcaaaagatttttcctcccttttcttggatgagtttttcagtgacaccttaatgtcgcattccttttcaactatatagttaaaccatacgatttatgacatttatgtgaaaaacttttgaaggaataaaaaggagtaaatattgatataaatatatttttaatgatagtaattaagtaaaagaggggatgaaaaaaggaacgctcatcatgtatgagtcattccttttttcatagattaacttgcctgttttttattattttctttcaatttctctgcttgtaaaaagcgattcgtttcagcaacaacaatactacttaatccaattagaccaatcaagtttggaattgccataagtccatttgcaatatcagcaaatgtccatacgattcctagctttaaattagcaccaattgcaatcataacaataaagattgctttataatatttaactgcactttctccgaataaataagctacacatttttctccataatacgaccagcctaaaatagtagagtaggcaaataaaataattgcgataccgagaatcatactaccagcagtaccaaatacagattggaatgcaagtgttgtagcttcaacgccagttttaccagatctccaagcacctgtagtaattaatactagtcctgtaattgtacatacaataaacgtatctagaaaagtaccagtcattgaaactaaagcttgctttgcaggcgaatcagtttttgccgccgccgcggcaataggggcactccctaaaccagcttcgttcgcaaatacaccacgcgccattccgatttgaatagctgatgcaactgttgccccaataaaaccaccagcagctgctgtaccattaaatgcaccaaaaaaaataagtgaaaatgcttctggaatttggtcgtagtgatagaaaataattataagaccagcaattatataaaagaaagctttaataggaacgacatatcccgtcactttcccaattttttttacaccgcctaaaataacaattgcgattaaaaatgacattactataccagttaaagcaggagggaaagagaaattaattcgcattgcctctgcaactgagttagattgcaccatattaccaataccgaaagaagcagttgagccgaatatagcgaataatactgccagccatttcttacctaaaccacgctctaaataatacattggtccacctgaatattcaccattttcattactaacacggtattttactgcaagtattgcctcggcatactttgttgccataccgaataaagcggtaatccacatccaaaatattgcaccaggaccaccaattgtaaccgctgttgcaacaccggctatatttcccataccaatcgttgcggccatagctgtcataagtgcttggaagtgactaatatctccagaagaagaggtatcttctgattttttaaatgctagtttgtgagcgtataatagtttactaaactgtaaaccttttaaacgcactgtgagaatgatacctgttccaacgagtagcaacaaagttggtaatccccacacgtattgattcatttgttctaatactttacttactgtctccatctttattctcctttatttagaaaaaataaaaaccacttcaagtaaatgaaatggtctctggagaaacaagggatagaaaaataaaccgatacaaatcggcattttctttcgcttgtctctgtccttttacctgagagattatccgctatagtagcggatttgctccttcggtgctcgttttcctccgcgctctatgaaagcgagagggagtctctccagagattcgtccccatgcagttctacttgtaaccaagacctgagagtttcaaagctggtataacaactttttgccccgtcggtagatcaatagaccttctcctgaatggttcatccgaattataaaatttataaacacattgattgtaaatcaataaaaatattatagacatacaaattgtgaattgcaatcattttttattttaaaatagtaaatagttttatttttttgtaagtcctaatttatcttcaacttcatttaaagtagataaagcgatgacaatatgttgatccgcaagtcctaaagcttgttttgttttttcaatagtttcatcggttggagtagagttatttgctccgtctataattaaatttgctgcatttttcatgaaatttgatgcggatttaaactgagttgtgaactgaagtagttgtttttgtatatctatatctgttatgttttcttcaattttaagcgtgtctatttcgttcataattgtttcgtactgcttggaaacagcactcattgtaactaatagtttatttcgatctactgaatctccattcgtgttaatctcttcccaggcaggtaaccaatctttttcgatgatgtcattataatgagtagtcaattcattaattttaggttgtaatttagttttgaaagtttttgtctccgctgtttctacagttgctttttcgtggttatttttaacattagtaacgtagaaaattgtaccaaaaatgatgaaaatagaaataacaactgtccatttagtaaaaagtaatttctgcaatatgtaacgcctccaaaatttaaaaacttataattataatatataataataatgttgttttaagtagagaaaataggttagaaataattaaaattatttcttctctatacataaataattaaagttagtaaaatgatgaaagttatatgtgagaaaagagggtttttagtgaaaatgaatagaagaaaactagtttcaagtatttcaatggctatgttattagttggtgtaattgcattcatatttatgaataaagaatctaaaattaaaggttttccagtaccaatgtcagcaattcatattaacgatgataaggaagaggactatcaatatataagtgtaatgccgattacaaaggcgagtggatgggagaacttaggggaaaacgggcatactgttagttttaaaaaaggggagcggaaggtaacagtagtacattatccaggagacattacgtattatttatttgagaaaaagatgaataagggagattagctaaagatgtaattcattaagagttacatctttttttattctgaatcatttgaaattaaattcgatagatgtagtgataaatatgattagttctatatgtctataaagagtattagggtgattataaaaatattatgtgaactaattattgtgagaagaagataaattatatgctaaagggggaattaaaaatgctactaaaaacaatctactgtaaggtggaagaagagaaaaaggaattgttttcaaatgcgcaaggaaaatggcgtgatatacggcacctagatgggtttcatggacaatttggtggatggtatgaagatgaggcatgtgtatttactttatgggaagatagaagtgcatatcaatcatttatgaatggtgctcacgatacaatttatttaaatagtaatcaagaggatacgtttctttcatgtgaaattgaattatttcaaacgttgtatgatataactgatacgcatttgaaagacgttgttacagaaggatcattcgtaagagttgctatatgtgatgtaaagatggaaaaggaaaatcattttttacataagcaagaaacaatttggaataaaggaatggaaaaagcaaaaggaatgttaggtggagtagttgggaagtctttaaaaaataaaaatcgttacatagtgttaacgtattggaaagatgaaaagacgcatcaacattatgtggaagagattttcccaggtttatataaattagctaatattcatgaagagatagaagagataaaaggaaaacaagctgtatgtaaggaagaatggcttgtatattaaacgctgaaaaagtgcataaatgaatgtataataaagatattttcttataaacaagtaattaatagaagacgttatataccctttcatgttaatatatttaagttataataggaggcttacccttttgtattgtacggtagaagcagtgtgagcttgaaatttttttagaaaaggatgtgcctaatttgcgtatcaataaatttattagtgaagctggaaaagcgtctcgacgtggagcggataaactaattaatgagagaagagtaattattaacggtaaggttgcaaaaattggtgaccaagtgaacccaggtgatgatgtacgagtaaatggagagcagcttcgaattgctcgagatcacgtatatatcgctttaaataaaccagtaggtattacatgtacgagtgaaaaatcagtaaaaggtaatattattgatttagtgaatcatcctttacgaattagtcacattggacgtcttgataaagactctgacggtttaattttgttaacgaatgatggcgatattgttaatgagattttacgtgctgaaaacaaacatgagaaagaatatatcgtttcagtagataagccaattacacctgatttcttagagaaaatggcagcgggtgttaaaattttaggaacaaaaacgcttccttgtgagattacacagttatcaaaatatgagttccaaattattttaacacaagggctaaatcgtcaaattcgccgtatgtgtgaagctttaggttatcaagtatacacgttaaaacgtacgagaattatgaatattgaattgaataatttaccagttgggcagtggagagatttaacgaagaaagagaaaagacgtctatttgcagacttaaattacgaaccacaagattggtaaaattgtgaagtgaaaccaaaaaaatttggtttcacttttttaaattaaataaataatttttttaaacacttgcaaaaataaaatgaataagatatattaaataacaataaatggatgttttataaaaagcaaagaaaaggacacgagttattttacccggttatacagagaaggaaggaaagctgagaacttcctaacgcagaaaaataacttaccaccttagagctgcactagggaaattaagtatctagtgccgtgtatgcgacgttatcgcaaaagaagccattatgtttttttgtgatgggaatctgggtggaaccacggatataagcatattcgtccctatatttagggatgaatatgcttttttgcattcaatttcataataagcgaagaaaaggacacgagttattttacccggttatacagagaaggaaggaaagctgagaacttcctaacgcagaaaaataacttaccaccttagagctgcactggggaaattaagtatctagtgccgtataaacgacgttaccgtaaaagaagccattgtttgtttacaatgggaatctgggtggaaccacgggtaaaagcacgctcgtccctattttagggatgagtgtgctttttattatgaaatggagagatgaaaaatgaaagaacaaatgattgaaattaaatttccagatggtagcgttaaagaatttgtaaatggagttactttagaagaaattgctggatccattagcagtagtttgaaaaagaaagcagttgcggggaaagtaaatgatggattatatgatttacgccgaaatattgaagaaaatgcggaagtggaaatcattactatagattcaaatgaaggggtagaaattgcaagacactccgcggcacatattttagcgcaagctgtaaaaagattgtatggtgatataaatcttggagtaggacctgttattgaaaatggattttattatgatatggatcttccaagtagtgtaaacatagaagatttacgaaaaatcgaaaaagaaatgaaaaagatcataaatgaaaatataaagatagaacgagttgaggtttctcgagaagaagcagctaaactgtttcaagaaatgaacgaccgcttgaaattagaacttttagaagcaattcctagtggggaaagtgtaacactatataaacaaggtgaatttgtagatttatgtagaggaccacatttaccatctacaggttatttgaaagcatttcaattaactcacgtttccggtgcatattggcgaggtgatagtaataaccaagtgcttcagcgcatatatggtgttgcattctcttctcaaaaagaattagaagagtatttacatttcgttgaagaagcagcaaaaagaaatcatcgtaagttaggcagtgagcttgagttatttatgttttctgaagaggctccgggaatgccgttttatttaccgaaaggacaaatgattcgtaacgaattggaagcatttttaagagaaattcaaaaagagtataagtatcaagaagtacgcactccgttcatgatgaaccaagaagtatgggagagatcagggcactggggacattataaagataatatgtatttctctgaagtagataataaaagttttgcattaaaaccgatgaactgcccagggcacatgcttatgtttaaaaataaattgcattcttatcgtgaattaccgattcgtatgtgtgaatttggtcaagtacatcgtcatgaatttagcggtgcgttaaacggattattaagagtacgtactttctgccaagatgatgcacatttatttgtaactccaaaacaaattgaagatgaaattaaatcagtaatggcgcaaattgattacgtatataaaacttttggattcgaatatgaagtagagctttctactcgtccagaagattcaatgggtgatgataaattatgggagcaagcagaagcggcattagaaaatgtattacaatcgctaaattataaatatagactaaatgaaggtgacggtgcattttacgggccgaaaattgattttcatattaaagatgctttaaatagaagccaccagtgcggaacaatccagcttgatttccaaatgccagagaaatttgatttaaattatatagatgaaaataatgaaaagaaaagaccagttgttattcacagggcagttttagggtcattagatcgcttcttagcaatattaattgagcactttggaggtgcgttcccagcatgggtggcaccagttcaagtgaaagtaattccagtttcaaatgcagtacatgaacaatatgccaatgagattgcacataaattagcacaagctggagttcgtgttgaacaagatgcacgagatgaaaaattaggatataaaataagagaagcacaaatgcaaaaagtaccgtatgttcttgttattggtgataaggaaatggaaaacggagctgtaaatgtacgtaaatatggggaagagaagtcagaagttattgcgctagatgtatttgtggcaactattgaagaggaaataaagaatagaaaatattgattgtaaagaaaacacactattagcaattagtgtgttttcttttttatcttacaaaaatgtaaggtaaatgtaagcgaaatcgagggaacgagttgtagaaaaatgagaatatgaagtaggaaaaaggttcatgttacaggtgtaactcttcttgaatgaataattaaaaaattcttaagaattcacatgacaaaataataagaaatatgtgagaaattaattttatacaaaagggatggagtgaaagagatgtcaacaaatgtagttactgtagaaagtgtagaaaaaacgtatgggaaaagaaatgagaatcagtcaaaagcattaaggggtgtatcgttaagtattaaagaaggagaatttgtcgggatcatgggaccttctgggtctggaaaaacgactttacttaatgtgataagtacacttgaccaagcgacaggtggtagtgtgacgatagctggtacaaatattacttctatgaagggcaatgcattatctgattttcgctctcaaaaattaggtttcatttttcaagattttaatcttctagaaaacttatcaatttatgaaaatatagctttaccactttctttgcaaggcgtaccgtcaagtgagattactggaaaggtaaatgacgttgcgaagaaattaggcatcaccgaaattttaacaaaatatccgacggctgtttctggaggacaaaagcaaagaacagcggcggcaagagctttagtacataatccagcaattgtattagcagatgaaccgacaggtgcgcttgatagtaaaaacgcaaaaagtttattagaagcgatgcaagatttacatgaaaatcacaatgtaagtattttgatggttacacacgatgcatttagtgcaagttattgtgagcgtattttatttattcaagatggtcttctttataaagaattaaaccgtcaaggtactcgagagaatttctatcaagacattttaggtgtgctcgctcatatgggctcagctgctgagtctaagtagggggtgaaactatgttatttaaattatcacgtcatagtatgaaaaagatgttaaaagattatatggttttacttattggcctcgttattagtattagtattttctacatgttccaaacgatggcgatgaatagtgaatttacaaaagataatagtctaattagtagtataaggctcgtcttctgggtaggtgcaatactattatccttcattactgtattttatattatatatgccaactctttcttgctcacattaagaagaaaagaactcggtatgtacatgatgcttggtgcaaaaaagaaaaaagtagcacagttattatttattgaaacattcggtatgggtattgtcagtattattatcggtattttagtagggatgttactcgcaagtgtagcagggaactttttaatgaatggaatggaaatttcagcaaaaggtagttacgcatctgtatacacaccagcaattttagttacagctattttcttcttaatattatttttcattactggcataatgaacagtgtccgattgttacgaaaaactgaactagagttaattcgtgaagatgaaacactagatgaagtgaagaaaagtaaaactcgcattattataatgacagtacttggtgtattactagtaagtacagggtactattttatgatcaatgtaaaaatttatgctgaattaggttttattatagcaaccatcgttacaacacttggaacatattttatctttagttcattactcccattttttgtgatgaaaattaaggggaataaaaaacgaaatgaaactggtctaaatagttttacatatgcacagctacgctttcgagtaaatagtttatcgagagtattaggtactgtagcaatgttaattgcattaggcgcaggtgcgatgacggcaggtatggcgttccaaaaaaatgtaggtattatgacagacttttctcgtgtatatgatgttgtaattcatgatccgaatgatcaagataaagctgccttaaaagaaatggaaattgttgaagaaagcaagtacaaatataaagtagatggagaagcggtttattatttacgtaacgacttaactgcgaaaccaccacttgtttcagaccattttgatacaaaaactttaaaagagcctattcgtaaacgtgtgactgaacctttaactgaacctgtatattcagctttagaggctcctgaattagcaaaattccctcaaatgccaaaggattgggaagacgcagttgtaagagagatacaaattacgcataatcaatttagcggaaaaccagtaaggattgcagacgaagagcattataaagggattcaaggaacagaacatactgtaacattagcaaaagtagatgatatgaaaaaatataaaccgttattgatcgaaatagacaagagacaaaaagaacaaattgaaaaagcaacaggtgaaaaggtagacttatttacgaaaatgacaatttatcagtttatgaacagcttcatgagcggaacaatgtttatgggatttttcctcggaattgcctttttagcaatgatggcaagttcccttatgttcaaaatattaacaggtgcttctcgcgacgtacgccgttatgaaatgttacgaaaaattggtgtgagacgcagtatgttaacgaaaagtatatataaagaaatttcatatttatttatcttcccagcgatcattggcatttcccacgtattagtagggcttaacttattcagctttatattagttgacccgtttgtaaaagtatgggtgccaataggaatcttctttgtcatttatttcatttattactggataactgttcaactttataaaggtatggtaatgccgaaagaagaggtagctaaatagtttatgaaaagagtccttgtgttgaaagcaagggctcttttctatgtgtttttataaaaatgtgtatgcgagatgttttcaaatctttctgtaatgaatataacttgttagacgtaattcgttataacgttggattatcacattctcaaactgtcttattagaaaaggatttaaaaaatccattgcctactaagcttcattccatgcagcaaaaacatattttgataagatagaagcagatcaaaaacaatttattacttttgagaaatcagctcattatccacaatttgaagagaaagaaaaattctataagtggatgtgcgatacattcataaaataaagtatatccgaactttagagaattgaaatagttagcgagatgtataaagatttttagatgcatagtattacatagtattaactgaagcgaaattaaataaaaagactcttgataaaaaataagagtcttaagtacaaccaactatgaatgacttttctttttataaagagatacaaaaataaaaaaagatagctgaagacaaattgttttcagctatcttttttcgtttaaagtggaggtaaatcaatcttaccttcttcaaataattcttttatcatatgcttcgtataaccagcggcttgaccaaatgtgatttttgctggcattggtgcttcgttagcatctacaactacatcaataatacacggtttattttgttttactgcattttcgaaagcgggaaggagttcatctaaattctcaacacggtatccaatacctccacacgcctctgcatattttgcaaaatcagggttcgttaaatctgtttcgaattcgatattacccatgacttcttgctcgaatttaatcatcgcaattttattattgtttaatacgacgacaacgattggtaatttatattttacagctgttacgaagtcattcatcgtcattccaaatccgccatcaccacaaactgcaaatacttgtttatctgggaatgcaatttttccagcaagagcaccaggtaaaccgcaaccaagtgttgcgagccagctagaaatgacaaattgctggtttgtcatacggaagtgtcttgcggtccatactgttacatttccgacatcaactgatagaattgcgtcatcatgtgctacttgctgcagagcatgcataacgcgttgtggtttaattggaatggaagagtcttcttcttgctcgtgtaatttttcttcccactttttcatcatttcttggtgctgttctaagaaggaatggtctgtgtgttcttcaacattttcaattaaccatcgtaatgttttatcagcatcaccagctaaaccaatatctgtcgcataacgtttcccgatttgggcaggatctgtatcgatatgaattgtttttgctttttcaggtaagaagccggtgaacggataagaagtaccgaccataattaaagtatctgcatgcttcattgcttcataagaaggtttcgttccaattaatcccaatccaccaatacaaagagggtgttcatcaggaataattcctttagctggtaatgtaagtacgattggagcaccaatttgttctgccaatgcaagtaaagattctctcgcatgttttgttccttttccagctaaaatcacaggctttttcgcttcatttattgcgagtttcgctgcatctaaatcttctttttgtggaaacaactcaggcaaagtaaaagaagtatttgtaacacgggcaccatttttcacttcaaatttcggaacatcatctggaatagtaagaacggatacaccttttttcgtataagccattcgaattgcttgattcactacggcaggtagttgctctgctgacataatacgctggttataaaccgcaacatcatcaaacattctttctaaatttacttcttggaaaaagtccgttccaagtaaatcggtttctacttgacctgaaattgctagaacaggggctttatcgagtttcgcatcatataaaccatttaataaatgaatagcaccaggtcctgcaattgccatacaaacgccaagttttcctgttaatttcgcataggcagccgctgctaatgcaccagcttcttcatggcgaacttgaataaatttaattttatcttgtttttttcttaaagcttcaatgatagaattaatggaatctccaggcataccgtatatgtgctctactccccaatcaattaataaatcaactaatgcttcacctgctgttttcccaaacataattgttcctccttataataggtagataacattatgttttgaataaaaaggaaaaatatacaagtaagaaatttatctagttatttgtaatccaagaatcagtgtgggaggaacaaaagtttcactttagcaactttaatgatgaccagcgaataaagtgaacactgttattagtaaaaaaccactagttgcccacattagaaatgtaaggaaagagagctgtttcttagctttccaaagcatttcatgaattgtgacatatccaagtgaaccgatagcacttcccataatgaggccttgcaggtgaagagcttttccttccatcaaaatgccaaaaactgtgccagtaccgagaataagagaaagtaataaagtcgttaataaaaaggaaatatatttatgttttgtaaaaagaaatggaataattaaagctaatccttctggaatatggtgaacgacgattgctattaaaaagggaatggcagagtcattatgatttataaaagctgtacctaacgcaaatccactcggtatattatgaataaatatagcgaaagagagaaaaaggaaggtttgccatgcttgttgatcttttttatgtatcattggatggtgacaatagttatctaataagctcataactaaaataccgatagctataccaagtataggcccaaccatttcgtagcttgaaaatgtttcaggaataatttcaagggataaaagcccaagtaaaataccaccacataatgcgtataaacgatgcatcttttcttcaataagttggcgtgttgctactccaacagcacctcctaatagtaatccaccgaacgaaaaaaatgttacaatcattggaatccataaacgttccatagtatcacactccgattctattcccttatttttagcttacgaaaaggaaagttagattagtccaagtaattgtgtttgattatagagaaaaaagtagtgattcgttataatttatatattaattttaagtgagaaaatgaaaaggggaattggttatgcaacaaattaaaaaaataggaaactcattttggtatatgacacctgtttctgaaacagatagacctatcttaggaatggtcgttggacaagaaaaaacgttaatgattgatgcaggaaattcagaagaacatgcacaattatttttagaaatgttaaaagaacaaaatgtatcgaatcctgattttgtagcattaacgcattggcattgggatcatatttttggattatctgtattacagaatgcattaactatttcgcaggctgaaacgaaaaaagaaatgcaggcaatagtatcttatgaatggacagatgaagcgttggacgcacgcgtaaaagagggtactgaaattgcattttgtgcggattgtattaagaaagagtttgaagaaaaagcgagaaatattaacattattcctccaaccttaacgttccaggatcaaatggaattagaccttggtgaagtgacatgcgtgttaaaacatgtgggcggagatcatgcgcatgattcagttgttatgtatataaaagaagaaaagatattgtttgtaggagattgtatatatgcagatattttttcttcaaagtggaactatacgacgaaaagaacgtttaaattgatagatgaattagagaaatttgatgctgagacatatattctttctcatggggcagctataaatcgagacgagtttttacaagaaattcatttgctaaaaacagtaggaacatatacagaagctcataaaggcgatgaagagaagataaaggcagcgtataaacaagagctagatagagaattaaatgcagatgagttagaaacaataacgtattttgtcaatggttatgaaatgaataatctgtaagacactacattaatcaaatataattaaattgcacaaaaagagtattgaaatttaattcaatactcttttaaatattaagttccaagcaatttctaaattttttggctggttcatcatctggatttacaccactttcaaaactggtagtgaaaggtaaccactgccaatcttcgcatcctacaaaagctacccttgaccaattctcaatgaattcaatgaaattattcgcaatcttatacccatgtccttctccatcgtcgtggcttaggtaaattatcggagcatctatatcatctttcatatcaaatgctaaataatctccatttcccacttcacaaaatgctaatttgttgtgccaaactacatcatattcatcatctagatttgaaaaaaactcgtcaaccaagtctttacgttctttttcgaattcagaaagactttctaaactccagtggggtgttccgcaaaaaatatcagtaaattcatttggtagctctacatcatcaggtaaaaaccagcgtaagctaaaatttcctgagaactctaaaagtacttttttgaagctatttggtagtttaatacccagtttttcttctacttggattatttgttcaagggaagatggttcatctatacaaacttcttgaacttcaccacctatgtatttaattctagaagttataatttctattcgttcttttagtaactcataatccatcttatcacctcatgttatattaattaaagtatatcattcttaataaattttttcgtgttattgaggttttaagtagcagctttctttgctaattcagtaatatattcaaagaaaacatcatgttttacatcataaacgacatttacaggtcgtccatcagtagtttcttctgtacgtccttggcttggtccgtatgtatgaacgatactattaatcgtttcagtttttgcaaggctagtgtttccgacaaaagcggtagttagtacatcccataaatagtaagtagagttcgttgagaagtgaacgagaggagggaccattgcatagcattgaccaaggaaatccataccaatatactttcgctcttttgcccactgttcacgtatgtttatagttaacggaacttggtttgtactttctagtgtcactaagtcgattttaatttttgcatcccatacacgagctactgcttcaggatcccaaaacgaattccactcagctgttccatcatgctctggttcatgtacattgccagctttaagaaatgtaccacccatccaaacgaggcgttcaattttatcttcgattatgggagcttcatataatgcacgagcaaggtcagttaggggcccagtaaataataaagttgtttttccttccgtttgtagaagcgtttctattaaatgatgatgcgcgggttttgccaccacgggtgttacaacttttccagactcatttaaaattggtagagcatctacataaaatgcatgcatccgccagtctttcggaaacgggttttgcccgcgagagtttgaagcggctacggcaatattacctttgccgaagcgatcgataattttacgactggcagacattgcgggttctaaatagcagtctgctgggataacagatacccccgtaagttcaatgttttccatttgaagtaataaaaataatgaaattaaatcatctacgccgccatcatgattgaagtacacttttttcttcattgtaatctccatcctatatgatttagttagaaattaaatatgaattgaggaaaagtcatcaataatttccaccacttcaatttctccattaatcagtagctcaggaagatcatttctaatatttcctttccaatactctctagcttgttcgattttttgagaaaaaggaattccatcttctttcggtaaaagattcccgtcaccttcaaaagaatttccaatcactcgtagtttaacaatctgtaaaacttctcgattgtaagaatcaaataatgttttccattttaaagcatcttcatagctttttgaagcgtataaacaagataacctggaagggtattcagggaattcttgtagtctaaccatttctacaattgtttctctaactgctctaattgtttgatccatataactcataactactttagtattttcattatttatatgtaattcgttatttttatagtgtttatttaaaatttgtatgccatcttcaccactagcatttaattgttctctttcaaaaaagaagtgatatagagtattgtgttgatttttgttaaaaagaatgatttgtccgatatgcatttttttccttgttacgatgtgatatgcgtaaaattctgcttcattcatggttatcctcctagtaatagtgtaatgcaatgttaaatttagtaattcaacattgcgatatatataacctctataagtaaaagtgagaatttgagtagaaaggaaaaaatgaaaacgttttaaatttgttcacaaaatgttcacttacgaagaggtttccaatgtcgatataatgacaaagactcaaagagaaaggatgatgaaatttgccaacaacaagaaaggaaaaactccaatttggcatgatgatgtgccttgggatggttatcgtaatgacgttttacaatttactaatgaatgaaacaggaggaccaatttatattaaagagattgcattagaactattaattggctttattattgcactattaattgaaatatgtatcgttggaccttgtgcgaaaaaaattgtattcatattgccatttgataaatctaaaaaaataaatattatcgttgcaatggcgacaactatggtaattggaatggtgttctttatgtcatttttcggtatggctatgatgtatttacatggtggactacaaggagattcatttgtttccatttatttttcgatttttattaaaaatttcataatggcatatccattacaattaattattatgggaccgcttgtacgtttcttatttacaaagtttgttatgaaaaagaaatattttaatgtagcgtaatttaaatttataaaactttatatataaataataaacataaacacaccccgcatttttgaggtgtgtttttttgttcattccaagttgttttcatagtgatgtgacatttgtccttttgccattataggatgatggtttttaattaagtcagaaataaaggatgaggagatgattttttgaaaggtattatatttgctgtttttgcggggatatttataacacttcaaggaacctttaatgcgaaacttagttcacatatcggtatatggtcgacgagtattataacccatttaattggattcattattgtaacaactgtatttttgttaaagaaagaagagaaaataacgaatttaaagagtgtgaaaaaaatatatttagcagcgggtgcatttggtggattcattatttgtgcagaaactatggcgatatatgcactaggagttacattgacagctggcacacttatggttgctcaattgttaacggcaacagttattgaaatgaaaggactatttcatataaaaaagatacagatggagagatatcatattgtgggaacaataataatgattataggtattgttgtatttaatatgtaaatgaaaggagaaatgaatatggaggatagatcaggtttaattacgcattatttgaaaaccaataaaacgctcgagattttttcagaaatagatacagcttattttcaattaaatcactttgaaaaaggcgagcttatttgcaatatagatgacgaaatggatcgtttatattttgttgttaaaggtaaagtaaaagtttacacgattacacctgaagggaagaaactaatccttcgctttatcaatccattggccattgttggtgatattgaattaattcaaaatagcaaagcacataatatcgttgaggcttgttcagatgttgtagcaatctctatttctaatacggttattagaaacaagttattacatgatcctatatttatgaagttcttgcttgaaaacattgcgaacacgttaaaaatatcgactcgttttactgctcttaatttactttatcctgtagaagtacgtgtagctagttatttgctttcaatttcaacagatagtaacgggaatatgtataaaggggatttggatgcaacttcagtaacgagtattgcagattttataggggtaagttataggcacgtaattcgggtattacaaagattttataatgaaaaactaattaaaaagagtaatggagttattgtaattaaagatttttctagaatgaaggaagtcgctaaagataatatatatgagcaatgaaagggagaggaagattttgattggatttagtttagctatattagcaggaatattaattagcgtacaatctgtttttaatgcaaaagtaaatgaaaatgtaggacagtggttaataactacatgtgtccttgggataggtctcattagctctattctattttatatcattacagaaaacagtattagcattaaagtgtatactgcaaattatttgttttatgtaagtggactgtttggtatcgggttaattatttgtataatgggtgcaataaagagtctaggtccagcatatacggtgctaattagtcttattactcaattggttgttgcgttatgcattgatacatttggattatttggaatggagagcattccattacaaataaataaattagttggtataggtttattaattgtgggagtaggaatttttaaaaatctatttttgaataagaaagctattcatataaatgaggatagtgtctaaaggatataaaggggaaaagtgtgaatggtcagaacttatacatttagatagtaataagtgagcgatgaggagagaggataaatgaatcagttaatgttgcaagatggtgtacatgatttggaaatcggtgagattcaacattttagctcctacgtaaagtgcatgcaagattttatcccgctatttgtcgggcagtaagacccctacctcaaaattcagcgaaagcaaagaagttaggtggggttcgggctgccgtaaaagctcgattggtgagggctaataatcagtgggggatgagcaaagcccccactgattaaattttcacttcacaattatgtttctgcctttgattttattgaaattaacatttataacctaagtataaatgtattgagctcttctttacttattattttttgaaccgtaaatgaacaaacttcaacatttttattaagtttacaattctcatcattatacgcgtactaccgtcccaatctttatttgtaggtatatctttaaagaaaggggagcagcttaatacttttattgtagaggaccatttttctattaattttggattgtttacgtaaaaatacatcatagcaccattattaccggatttctttacagtagcattcgaaagattcagtgcgaactttgattcagcgtcaaaatataattctcctccagggaaacgttttgacatagcgactacgatcttttttaaatcttcttctttaaagtaataaaacacacctgctgatataaaaagaataccgtcgtttgaattatattttatatcgtcaaaccaagaagtatcaaatagtgatttagcaatgctaatatttctaggcgtatcttcaattaaagttttgcgaaaagagattgcatcgggcaaatcaaggttgtaccaatgtattgtaccgttatcgattcttgaaaaagtagtgtctagtccggaaccgatgtttacaatagtagcattcgggtgttttattataaattgttttatcgtatcgtcaatttttcgtgcacgggtaatgtatgtgatacatccgtattcgccaaatatatttgctattgttgagaagtcaaaattacattctttaataattcgaatagcctctatatcatctaaaatatccttatttttctcactgccatatgctcttccccataagggaataagcatcgtaccttgcacggattgtaaatctaattctttagccatgaaacatcctccgtttagtaataaacaatatatttagtcgttatttaacatttttgagagcattgtatttgttttatatagtccataagttaaatcccgcctatcttcttcagataacttttcgaggtttactgtgaaattattatatatttgtttccatctctcataatgtactttttcagctttttctgtcagagagattaatatagctcttttgtctaccatatctttcttttttatgatgtatccgttttgttctaagttacgtactgttacacttaattgttgtttagggatgtttaaataactagcaatcatttttaaatttacaggcaccttttgctgggcgatatactctactacatgttgttctaaatgtgtaaattctgaggatttctccgatagtaatttaaaagtacctgacatatttaataataaattcatgtattcgtttaataattcgttttggttcattgtttttgattcctttatgagtttagttattattttattactaaattcaatataaatcaattaaaattactctttatagtaaatgaatgtttactaataactgttttttgaatttatgtggactgaattatgaggatgcgagaagtggttttagggaacgagaatataaccgaatataaaatattactaaacgtatataactaatgaatacaatgtctttttcagttattaagttgtaaatcattttatgataaaatcttttacataatttaataaaggggtagtatttaatgggttatttctcaaatggtttattagttttgtttgtgcttatcgtatgtagttgtataatttttggttgataatataatgagagtcttatataaaagaagttatcttaagtgagataacttctttttattttatattgagaaggaattctatctttcttattgaagtttgttctagttatttttacatcgatcagatttgtgtaaagggaattttatgaaatataaacaagctagagaatagggagtgtttacatggaaaatagtatacgctacacaagtgaacaccctacagattttaatggattattatccttatacgaatctttaggatggaattctcttaaattaacggttaacgagttagaacgaatgtgtaagcaaagttggtatgcaatttatgtttttgatgataagaggttagtagggatggggcgtgtcatatcagatggagtcataacaggcattatttgtggagttggtgtattgccaaaatatcagtctagtggcatcggaaaagaaatagtgaaacgattaatccagcactgtgaacaaaacaaggttattccacaacttatgtgtgtagaaaaattgcaatcttactatgaatctatagggtttgaagcattctctattgggatgacaaaacatattataagatagaggtgctttatcctgctatttgtcgggtagtaaaaccccacggattaaagtttcactttatattttcagtttacttgtacatattttcaaacttcaacataaaggagaatggctgtatggagattgctaaaggagtagaaatgttacaacttgaatttcaagaatttgttattcatccaattcttttatggaatgatgaaatggcagtattaatagatacgggtttcccaggacaaattgaagatatacaagtaaagatggaaaaggttggggtatcatttgataagttaaaagtcgtgattttgacgcatcaggatattgatcatataggtagtctgccagaattgttgcagcgctgtcgaagtaatattaaagtttatgcgcacgaactagataagccatatatcgagggggatttacctttattgaaggacggaaatgtagagaaccgcccaaaaggaaaagtgagtgatactgtgattgacgggcaagaacttccgtattgtggtggaatactaattcttcatactccagggcatactccgggtcatattagtttatatttgaaacaaagcaaaattcttattgcaggagactctatgtatagtgtgaatgggatgttaggaggaattcacgccccaacaactataaatattaaggaagcaaagcagtctttgaagaagtatttaaatttacatattgaatctgtagtttgttaccatgggggattaagtaaggagaatataaatgttcaacttcaaaatttgtaaagttaaaatggagttttttgttaagtgacgttgaagtataatctgattattagtatataaataaattataaaagagcatgtttgaaaaaattaaatatgctcttttattaaagtaaatcagtttaatatgaatgacctaacccattccaataaaaagaaacgatttcttgtgctaattcatctatatttgccagaataggattgtgattttcatctttaaaattcccaattgataataaagatacgaaagcatgagccgcaaatttagcgtttcctttcggaatttctccgatgtgcatcgcattatcgagtgctttttctagtacttcatacatattatcttcagcattttttaattgtttcaattgttcttcagataacgacagttttgcatctttcataaaatttttcatatcaatatccatcgttgcgtgtaagtaaactttagcgaagtctaataatctttcttctaaagttttgtttgtagagagtatttgagacatattctcacgtatacgtaccatcatttcgatcatagtagcggtaaataaatcggcttttgttgaatagtaatagtagacagttgctttcgtaacaccacaaacttttgcaacctcatccatagaaacgacttgataattttgtgtaagaaataagcgggttgctacttctaaaatggtttcttttgtagattttgtatttttattttgacgcggccttccgagaggacgttgtttttgttccaaatacattcgctcctgacatttatgattgagataattataacataattttcaatcattcttgattaattaaccgaccagtatatataattaataatggaggaaaaaaggaaggtgggtttttatgaaaaagcacccgttacatatgttagggaggcttgtagcagggaaaaatatgcaatggatcactttatcggtgtgggttcttattacattattactttcatttacgttaccacaagtaaacagtacgaaagaaccgaatccaaaaaatttacctgaaacagctatgtcacagcaagcggaagcgcttatgaaaaaagagtttccgaataatgcagggaatccgttgttagtagtatggtatagagatggtggattacagtcacaggattataaactcatacaagacgtttataaagagttaaaagctagtcctttaaaagaacaatcaacgttaccgccatttgatacaattccagagcaagtattatcaaaaagtgcatcaaaagatggtacatcatttgttacaccagtattctttaataaatctgctggtacggatatattaaaaggaaatctggaagagtttagaaaaatagtgaatagtaaggtggatgaagatccatttaaacaaaaaataagtgaatctggtttacatgttcgattatctgggcctgtaggtattcaaacggatgcagttagtttatttagtcaagcagatgtgaaattgttagtggctactgtattattagtcttggtcctattaattttgctttaccgttcgccaattttagcaattttacctatacttgttgttggctttgcatacggtatcattagtcctacactcggttttttagctgatcacggatggattaaagtagatgcccaagcgatatcaattatgacagtattattgtttggtgctggaacggactattgtctatttttaatttcgagatatagagagtacttgttagaagaagaaagtaaatataaagcattacaacttgcgattaaagcttctggcggtgcaataataatgagtgcgttaactgttgtacttggattagggacattattacttgctcattatggtgcctttcatcgatttgcagtaccatttagtgttgctgtatttataatgggaatcgcggctttaacgattttaccagcactattattaattttcggtaggattgcatttttcccgtttataccgagaacaacttcaatgaatgaggagtttgcaagaaagaaaaagagggctgtaaaagttgaaaaatcaaaaggctcctttagtaaaaaacttggagatgtagtagtacgaagaccgtggacaataattatgctaactgtgtttgtattaggtggattggcttcgttcgtaccacgtattcaatacacatatgacttattagaatcgtttccaaaggatatgccttctcgtgaagggtttacgttaattagtgatcatttctcagctggtgaactagcaccagtaaaagtggttgttgatacgaaaggaaaagagcttcctattaaacaagaactagagaaattttctttcataaatacagtgaaagagccaaaagagggaaaagaaaataagcaaatacaaatgtatgaagtttctttagcggaaaatccatactcaattgaagcgttagatcaaattcctaaattgaaaagtaatgtagaaaaagtattaaaagatgctgggattagtaatgctgaagagcaattgtggattggtggagaaacagcttcattatatgatacaaagcaaattactgaacgtgatgaatcagtaattattccagtaatgattagcattatcgctttactattacttgtctacttacgatcggttgttgcgatgatttatttaattgtaactgtcgttttatcattcttctcagcgttaggagcaggatggatattgcttcattacggtatgggagcgccggccattcaaggtgcgataccgttgtacgcattcgtatttttagttgctttaggtgaagattataatatctttatggtttcagaaatatggaaaaacagaaagacacaaaatcacttggatgcagtaaaaaatggtgtaatacaaacaggtagtgttattacatcggcaggtttaattttagcaggaacttttgcagtgttaggtacacttccaattcaagtattagttcaatttggtattgtaactgcaattggcgtattactagatacgtttatcgtaagaccgttacttgtacccgcaattacagttgtgttaggccgatttgctttttggccaggtaaactttcaagaaagagtgaagaaatacaaaaggtggatgcatagttaaaaaagccaagggtattttccttggcttttttcaatgtagttaattaattttttgaagtcaaatcatcagctgcagcgtgatcagcatcttcaattgttgtttcgggcattccgtataagccgttcattgcttgttcttcaatagtaaggtttgcagtattattattttgaatagatgtagtattttcagtaacattttcttttttattcatatttttgttattcatgtatgtatcctccaaatttcatttgatttatctatagtatgtggatggatttcaagaaatatgtgaattgattcttacatatgttatataattaaataaataattagggtgaaatgtaaactgttaggagtgaacaattatggtgaagcaagggaaatagccttctaaaataaaaagaaaattttaggaggctattagaatgaagtttcatgtaattgatagagaagattggaatagagagcagtattttgagcattatttaaagttgaaatgtacatttagtatgactgttaatgttgatatcacgatgttattagagaaagtatatcaaaagggaataaaattttatcccgtttttatatatttaatttctagagtagtaaataatcataaaaaatttcgaacatgttttaacgatgaaggagttttaggctattgggaggaaatgataccgagttatacaatctttcataaagatgataagtctttttcaagtatatggacggattattcaagtgatttccgcactttctataaaaattatgaagacgatatgagatgctatgctagtgttcatggtcttttcacgaaagaaaatattcctcctaatgtatttccgatttctagcataccttggactagttttactggatttaatcttaatattaataatgatgaaaattttctattgccaattataacttgtgggaaatattttaacgaaggaaataaggttatgctaccagtttcattgcaagtacatcattcggtttgtgatggatatgatgcgagtcaatttatagaagatttacagcagttaagtaacacttgcaacgattggcttaagtaatatctaatttttaattatataaagtgaaactttaatcagtggggtgtcagcccccgctgattattagcccgacccccacctaacttctttgctttcgctgaattttgagatgggggtcttactgcccggcaaatagcggaataaaattgaaaatgaataaaagaagagaccatgttgatattacatggtctcttcttttattcattaatactaagtaattgtggaaaatataggatgatttgtagtttaatagtaaagagagtgattagtattaattttctttgtttttaaaattttaagtatgtaaatgtttaacaggggggaataaagtgaaattcgtaagcattgaaaaagatgaaatcttaattgaggatatggcaaaattgtattgtaaagtatttgagaaaataaatttcaatgaaatgatcgagcgaatgaataggcatatagaatatacaggttttaaaggtatagtagcaataaatgatgaaaatgaagtagttggctttacttatggttatcgctcaatcgagggacagtactataatcaattaatgagagaagcgttacatctagagcaagtagacgaatggttgcaagattgttttgaatttgtagagttagcagttcacccacaatatcaaaataaaggtcttggaacgaaattacataatgaattactagaagggctttcaaatagaacgagtgttttaacaacacaaataaacaatgaaaaagcacgttcgttatatgaaagattagattgggtaaatgttttagagccatttcatccaagtaaaaatgatgttccatatgtaataatgggaaaagtattaaaaataaaagtgaattgataattatggcattcacaaaatggttggtttgtaataatgaaggggaaaacgaaaatgacgagaatatctatagaaaaagctacaattttagatgctgagaaattaacagaaataatgaaaagaacatttgatgcagaagcaaaacaatggctatacggccaagatgatgtcattgattataacattcaaccgccagggtactcttcagttgaaatgatggaatattccattgaagaattggattctttcaaagttgtaatggataaagaaataattggagggataatagttacgatttctggtaagtcgtacggtcgaattgatcgtatttttgtagatcctgtttatcaaggaaaaggaattggatcacatgttatgaaattaatagaaaaggaatatccaaacataaagatttgggatctcgaaacatctagtagacaaattaataatcatcacttttataaaaagatgggctaccaaatgatttttgaatcggaagatgagtattgttacgtgaaaagaataaaaacaagctcaaacaaagagagtgtagttacaaataaagatatgaaaaatagtcaatacgaaaactgtaatttagcgaatacagggtattatcaagtgaatttaaaaaacagttcatttgttggtagcaatataataaatatgaatatgagtaattgtaatgtaagtcaatcaaagtttagaaatataaattttagatggtcatcatatgcagatttaaatctttctggcagtaaatttaatttggtgactttaggtggagtgcaatttaaaaatacaagtctcggagatgagaaggaacctattgtattcgataaatgtgatttggaaggcagcactataagtaatagtaatctgaaaaatattgaaatagaaaattgtaatatagtcggcatgaaactaaatggtattccaattgaaaatttgcttaatttatataacgaggcgaaaagttaaccaaatccatatagttgttaatctttttggaaattaagtattatatcgaaataattatgtaaaaatgacataaagaaatacgagtgagaaggtcattcatacacgtttctagaattacacacaaacaaatatattgttatttatatggaggagagaaagatggggatcaacgttagagcagtagaaatacaagatgctagagcaattcatcgtatatgtatacaggatgacgttttaccgtatatggttttcttacctagcatgcgtgtagaagctatggaaaatagaattcgaaatttagcaccaaatcaatttgaatttgttgcagaatatgatggagaagttgttggatttgtaggtttaacacaaagtccgggccgaagatctcattcaggcgatttattcattggggtagacagtgaatatcataataaaggaattgggaaagcacttcttatgaagatgcttgatctggctgataattggttaatgttagagagagtagaactaggtgtgttagaaacgaatccaaaagcaaaagctttatatgaaaaatttggatttgtagaagagggagtaaagatagggaatttgaaagctcacggaaaatttattaatgaaattatgatgagtcgttttagaccgaatggtttaattgtacataatgaatagttaaaagcatgacagtatactgtcatgctttttcattagaatttggctgtaataaaaataatactaaaccaataaaaataacggtaattcctagtccttgttgtaaagaaatagtctcatgtaatataaagtacgctagcatacaagtgccaattgtttcacctaaaatactcattgaaattacagtagcactcatccattttaataaccaattaaaaatggtttgtcctaaaattgtagcaatgaaagctaatccaataaagcacaaccaagtttgtgtagagtaatggatgaaagattcttgttgcatgaaagcaaatatgctaagaaagccagcactacttccataactaattaccgaatatggtataagtgacaaatctttacgaacgtgttggctaatgaaaaaataagcagtaatgataccggcagcgataaatgctaaaatatctccatataaagcttctccactaattttgaaatcttgccagccaatgatgatactacctgaaatagcgatgaggcaaccaataaccgctcctttcgtaaatctctccttaaataaaaaataaccaccaatcattgagaacaaaggttgtaacgttacgataactgtagagcttgctacagaagtatattgtaatgattcaaaccatagtacataatgtgcagctaaaaatagcccagatgtgaatccgaatgtccattgttttttcgttaaagtttttagctcatttcgactatttttattaaatagtaataacggtaacaggatcagtgtggcaaagaataatcggtaaaaagcaatgattgtcgcaggagcatctgccaattttacaaaaattgctgaagttgataaggcgaatacaccaaaaaataagatgaaatatgaaagaataggtgatttcaaagtttgtccctccgatagaatgtttattataataaacttaatgcgatataatgtacaaaagtaagtatataagtcccggagataataggaaaggattatttgcctttgtttagtatgtcagcacaaagacaatgaaatatgcattatgatggacgaaaggaagttttactatgatacatgataggcttggacaaacagtattaagttatcgtaagaaaaataatatgacaattcgtgaattcgctgattatgcagggattagtacgtcactaattagccaaattgaaagaggacatgctaatccttctttaaatgttttggagttaattgcaaaagcattaaatgtaccgctgtttacactttttattaatgatatcgatacagattcgctcatttctaagaaaaaagatcgaaaaaaagtatatcgggaaaacaatgatcacattgtatatgatgtattaacacctgattttatgaaagcacgtattgaaatgttaatgatggatttaaataaacaagcaaacacaacagaaagtcattattcccatgaagataaggaagagattgctgttattatgaaaggggaagtgtatgtagaattggagggaaaagaatattttttagaagaaggcgatgttgtacgtattccaccaaatgtgaagcatcgatttttgaataaaagtgatgaatcgaatcacattttatttgtactgacaccatctttaggatgaaaatatagtgattttaactagaggagaaagaaaatggaaaacaaaagtattttaaaaggcggcctttcaattatttctcaatgtaaaaaagaaacaaatgatatttggcatgcgcattttggagcagctgcaattgctagttattttaatcatataaagagagctccaaattataaagatataacattagaaaaattccggtatgttattcattcttaatgaacgtcaataatctgtaaaaggaagcttaatctagtttctttttttgttagtagtatattattttttcaaatatgtaagattttacatgcgtattttacttttactaattatgtaagtaggctatactgaaatacatacattttatttttggagagatgtaaaacgacatggaactagcgaaattggaaaaagtaattgaaataaaaaaagaagaacttttatatttagtatcggattatggaattcaacatgaaaaagtattggcattgagtcaagaactagacaaattaatcaattactttatgtttttaaaataaagagaactatgacgtggtttgtatatgttatagttcttttttattaggtaatttgaaaatatattcaaatatattgtctaattttttacagaatgcgcaacttgctagtcgaatataaggacttttggttataataaaaaggaattattaattgtatcggttaggagcgcagcacatatgaaaacagttgttgttatcggtggaggtataacgggactttctactatgttttatttagaaaaattaaaaaaggattataatatcgatttaaatttaattcttattgagaaagcagagtatttaggtggtaaaatccatagtgtggaagaaaaggatttcattatggagtcaggagcggattcaatcgttgctcgtaatgaatatgttatgccacttgtaaaagatttaaatttagaagatgaaatggtatataatgaaacgggtatttcttacatatattctgaaaacatgttacatccgattccttctgatactatatttgggataccgatgagcgcccagtctttgtttagcagtacgctagtctcaacgaaagggaaaatcgtagctttaaaagatttcataacgaaaaataaagagtttacgaaagatacatcacttgctctatttttagaaagtttcttagggaaagagttagtggaaagacaaattgctcctgtactttcaggcgtatattctggtaaattgaatgagcttacaatggcatctacattaccgtatttactggattataaaaataagtatggaagtattattaaaggttttgaagagaataaaaaacaatttcaatcagcaggaaataaaaaattcgtatcatttaaaggtggactatctacgataattaatcgcttagaagaagtgctcactgaaactgtcgtaaaaaaaggtgctataacgacggctgtaagtaaacaagaagatcgatatgagatttcttttgtaaatcatgaaacaatacaagctgattatgttgttttagcagctccgcatgatatagcacaaactttattacagtctaatgagttaaatgagcagtttaatacatttaaaaactcatctcttataagtatttacttaggatttgacatactagatgaacaactaccagctgacggcacagggtttattgtaacggaaaacagtgatttacattgtgatgcttgtacatggacaagtcgaaagtggaaacatacatcgggtaaacaaaaattattagtaagaatgttttataagagcaccaatccggtatatgaaacaatcaaaaattatagtgaagaagaattagtacgagtagctttatatgatattgaaaagagtctcggaattaaaggtgaaccagaagtagtcgaagttacaaattggaaagatttaatgccgaaatatcatttagaacataatcaagcggttcaagcattgcaagaaaaaatgacgaatctttatccaaatgtatatttagctggtgcctcatattatggtgtcggaattggtgcgtgtattggaaatggaaaaaatatagccaatgaaataatggctacattaaataaataatactgtagaataaataaaagctgttccttcagcaaaatggaggaacagtttttatttattttatttgaatggaaattgtattgttttttatattgttttcttttaatgttaatgttatttctccagactctttaaatgaatacggtgatagttgataaatatcttttatatcatgtttttcttgtaatttatttaccggtattgatacgatatttggcttccatgtttcttgttttcctgaaggatattctataagtattaccggattttttaactgtattgttttccaagagacgaaatatagttgtacttctgtatctttttttaataattcttcggagaaataaccgaattcgcctatattaccgaaaacagtatagttttgattttttaatttaatatctaaataactaggttgatatgttaccgcatgataagttccatatgaaagtgagagtatggcagcgattaaaataccgattgaaaatgtcctaaagctattacctttaaagctagtcatcatgaatgagtttggtgtgaatttttttgcgaataaaaaaataagtaatatgagtaagagggataagccgatgaatatatacataggaaatcttcacctccacaataaaataatatattaactatattttaccataaatgtaaggggtaggtttgttgtttagaaggagaaaatgaagaaacaatttctttacagttcttgataatttaaaattcgatttatggaaattatagcgtcatgtttgaggtgcaatcagaaggtatctaattcgtgtatatagaattaagagagaatgtgccattagaaatgtttgatttatggaacaataaggactttactaattatacatattttttctgatataatgaatgagtagagagaaaggagtgatcctatggcatttcctatactagaaacagaacgcttacgtttagttgaaatagaacaatcttattgtcaaaaaatatatgaaatcttttcattggatgaagtgacgtgttactacggtatgaattcttttacggagtttggacaagcttcacgtatgatcgaatctttttcaaaaaattactttgagaaaaaggcaatacgatggggaattgtgttaaaagaaacgaacgttttaataggaacaattggactaaacaatttacaattatggagtaaacgatctgagattggatatgatctgcatcctcgctattggggaaatggttatgcttcagaagcagctggagaaattattaattatggatttaaagatttaggtttgtttagaattggagctattacatatcctgaaaatgttacttcttgtagaatgttatctaaaattggcttccaaaaggaagggctattgcgcggatatattcatcaaggaaataagcaacacgatgcattgttgtattctatagtgcgaactgatgttgaggacataaatttataataaaaaaaacctcttaattaaaagaggttttttttattataaattaacctaatttaggtaataaacgttctccgcttttcatgctacttttacataaagggcatttaggctcttcttcaaatgaaaagttctttctcatccatcctaaacaatcctctgattcacattcccaaacaggggtttgttctggtggtacttctgctacatcgttctttcgattgcgatacatgtaaccactccttttatgtaaaaaattttagttatatattaaaaaggttgttaaccttgctggtaacaacctttttattgtttgaattatagctttacaacgtttttagcttgaggtccgcggttaccttcttcaacttcaaagctaacttcttgaccttcgtcaagagacttgaagccgtcgccagtgatagctgagaagtgaacgaatacatcgttaccgtctgcaacttcgatgaaaccgaaacctttttcgctgttaaaccattttactttacctgttaatgtcatggtaatgcctcctaaaagtagaaaaattacaatatgatcggccttatttgaatgaaaataaaatttcacatattatcaaaaacccataaggagtacaaactgtccctgattgatacttgataatatgcaaagaaaatatagtgttaaattgaccttaattactatcttacaacaaatggtgggaaatagcaagtgctggtaataccactgagtaatctgggtgataatagtaaaggcacaaaggcacctcttttatttatatattattcctaattgggatttatgcaaaatcatgtaagaaaaacttagagtaaatattaataatatatttttcgtggtaaaatatggttggttactgttggtagttaaatattataaaaggagaaaagaaagtgaaaaataattcatttataataattgaagcagcaaaagcagggagaaaaaaggtccatccagtctttgctgtaatattagccattatatttttgactttaggcgaactttttatgttatttatgttatttttaccgaaagctgaaacgatattcatgaaaggtatttatgacaatgttagaatggtgttaacgtttggcggagctatatttattttatttatatgggttcgttttgtagaaaaaagacctttttcatccattggcttttggaaagagaaatggatgagaaagtatttaaaaggtgcgttaatagggtttttatttatttcaacgccagttattctactattattaatggggagtgtgaaattgcaagtacaacatattacctcaacagtgatagtaggaatagcaggatctctagttgcatttttaatacaaggggcaacggaagaaattattgtacgaggttggttattcccggttctttctgttagaagtcgtatatgggttggaataattgtaacttcatttttatttggatttcttcatctacttaatccaggaattacaatattatctatatcgaatataatattagtgggtgttttcgcagctttatatgtattgaaagaagacggtctgtggggaatatgtgcatggcactcaatttggaactgggctcaatataatgtatatggttttgcagttagtggcacaactgtatattctactccaatttttaagtctataacaaatggaccagaaacattgcatggaggcgcgttcggaattgaaggtagtatcattacaacaatcatgctcactgtcgcttcaattgttttatggagaaagttatggggaagaaaagcgaaacaacgaaattttagttaatgaaagagggagaaactatggggataatagcatttgagggagcaagcgctgttggtaaaagtaccacgtgccgtgaattagaaaagaattatggtgcttatataatacctgaagtgaattctttatttgaaaggccaaaaaatgaacatagaacatggtattttgaaaaacaagttgagcgctggaatatagctgttcagaagtcaaagcaatatgaattagtaatactcgatggcgatatttatcagccacttagttataattggtgttttcattttgatatatttaatcagccattatctttaatagaaaatttttataaagaaaagatgataaatagggaaattggctttccggatcaatatttttatttatatacgaacgatgaagaacttagaaagcggaaagtatctgatgagacgaaaagaagaagaaactttgaaaaacatttacatatatcaaaatcgtttcagcgttattatgaaaatttaaatactgttacagatgggtattgtaaattaattgaggcaaaaagtgtaagaaataatgaattagaaatagtgagaaactcacaaaatttgaacgtgtgtgaagaaagacgttttgatgtttcgaagttagatgctattacgaagtggttaaaagaaaatcgtgcataaagtaaaaacaacgagtgttgtagaacgccctcgttgttttttgtttctttataaatataaaggaaaaatttgtagaatattttcattatttaacagaataatctttcaattttaaagaaaaagaaatacaatatgaggaagtatatataaataatatgataggggatgggatgcgatattttgaatgaagtaacagtttttatataagaaataattagatagtcagaacggagatatttgggaggaaacaagcgagatgaaaacatttttgaaaataataggtgttatagctggtatggcggtaattggagtaggtttaacatatggtatgctgcattatttaaataatagtaaaccagctgcgaaaaaggcatcaccagctgctccagcagtagaagtattagctgatagtaacgtaaaagcagaagatgcaaagcttttagaaaatggaaattattcattgccgaatagtggttttaataaaaattttaaatggacagatgagaatatacagacagcattacatgaaatggcacatcaaaaagcgaaagctgatcaaaagtggggctatatttttattacacaagagcggattgaaagcttaattgatattgtaaagagtaatgatcttgtacagggaagtacatatgtagaaattttagaacgatggaaacaaggaaaatatgaaaaggttgatggggatcataataagatttggaaattacaaagtgggaatttaggagaaggaaaaggagtaatgtcggaagctgagcaaaaagaattaattaatcaagtgtttatgaacaaaggtacatattcaggtagtaaattaattgcaggtgggggacagactaataaatagtatactaattaatgaaagagagtaattgcttattaggcaattactctttttctatgtacgtcttaatattttagtctcgttcaagtaaggaaaggaacgattgtaataccggggaaatccatctagatttatgatagattacataactttgaataactgttggagtttcgataggttgaaaacatagttgtcctttttggcaactttcttgtacaacgatataaggaagaattgaaatgcctaactcacacataacggattgtttaatgacttcaacattggaagtttcaaatgttttagctggaatatttccactttgacataaaaaacgatctaccattggcctatagccgcagctttgttctgtaaaaatgaactgggtgtcctgtaataactggaatggatttgtatgtgcagcggaatgatctggtaaaatccatccaaatatttcattactaaaagtacgcgtaataaaatcattatgttctatactttctccaattatgaagataacgtctgtttctccttcacgtaatttttgtaatgcttgttcatttgtgtttgtttcaagtacgatatttactttcggatttttctgtttgtaagtacgtaataattgtggtaatcggtataccgctaatgattcattagatgtaatacttaatgtaccttctaaataatctgtattttgggggatttcttgcgctttttcatatattgaaagtaattctaatgcataaggatgaaattgatgacctgcttttgtaagtagcacttttttccctaaccgatcgaaaagaggaatatgtaaatcgttctctaaagctttcatatgtgctgtaacagtagattgcgcataacctagcgcatgcgcagccttagaaaaattaccatacttcacaatggcgcaaaatgttttaacatgtctcatttccataagcaatccctcttttattatcatgatttgtgaatgattatatcatgcattttaattttccaaatgattaaattctgtataaaatgaaattgtagaaatattcatacaggtgatattggaggagaaaagatgaaaaaaaagggctatcatgtagctgttgttggggctacaggtgcggtagggcaaaaaattattgaactgttagagaatgaaatgaagtttaatatagttgaagtcacattgctttcgtcaaaacgatccgctggtaagaaagtaagattcaaaggacgagagataattataaaagaggcaaaaacaactagctttgaaggtgtagatattgccttttttagcgctgggggagaagtatctagacaatttgtaactcatgcagtttctagtggtgcgattgtaattgataacacaagtgagtaccgaatggcacaaggtgtaccgctcgttgttccggaagtgaatgcgcatactttaaagcagcataaaggtatcattgcagttccaaattgttcagcattacagatggtaacagcacttcagccgattcgaaaatcattcggtttagaaagaattatcgtttcaacatatcaagccgtatcgggttctggcattcatgcgattcatgaattacaagagcaggctaagtctatgcttgctggtgaagaagtgaaaagtaatatattaccggcgaaaaaagataaaaaacattacccaatagcgtttaatgtactgcctcaagtagatatatttacagacaatgattttacttttgaagaagtaaaaatgattcaagaaacgaagaaaatattagaagatgaaaacctgaaaatggcagctacttgtgtacgtgttccagttgtatcagggcattcagaatcagtttatatagaactggaaaaagaagcaaccgttacggaaattaaggaagtattaatggatgcaccaggtgttattttgcaggataaccctagtaaacagctgtatccaatgccattatatgcagaagggaaaatagatacatttgtcggaagaatacgtaaagatcctgatatgccaaacggattccacctctggattgtttctgataacctattaaaaggtgcggcttggaattcagttcaaatcgcagagactttagtagaaaagggaatactttaatctagtttgaaaaaccggggaatcgataatcattttccggtttttatcccgctatttgctgggcagtaagacccccactgattaaagcttcactttatttaataattgttttctttatttcgcccaactttaatttaaattagtcgttattgaatttttataaatatctactttatgtgcagtgaagcgtaaggttttggattctgcatgaattgttaggttaataataatcgataacggcatttcgaccgttttcacaatatcttctatagcaatatactcattttctgcttcgttataataaacaacagaacgaattactgtctcgttattttcaatgtcaatttcacacatcatagggaatttttcaccattatgtaagaatagttcgcctagtacgattgaaccgtttagctcctctgtaaaattagtagttgctgctggttttacccatgtttcgtcatgttcttcgttttcctcttcatctattgtccattcccaaatggggttttgttttaggtcttcaatagttaattcatcaattggtttgcaattgctcatacataaatcctccttttgctttgataaataagtttcttaatctcaaaaattagatgattgcttacgagtaagttcaatatagtattttgctcatttgatattaaactattttattttgaagtaaagcttctatagcgatattaacaaaaaaataattatttagtaaataattattagtggaggttttaaagtggcatagagttaaggtagtaaaaaacatcaagaatgaatgggattcatttggtacgatatggatatgtttaataagagggggaatttgatgtatcaagtaaaggggtatttttcatcgctcaaaggaagtcattatgaaattggtaagcaacaaggtgaatttgtgaaacaacattcttatcttattccgcaatttatagagcaagaaaacttaatatcgcataaccattggacagaatctagaaatatattaaatcaatattgttctggaattaatgaagaaattgaaggtttttgtgaagtgttaaaaattccttcaaaaaatatgatgtattactatcaaacactattgaaagcaggttgtagtcattgtgcagtattacctaaaaagacagattcaactcacacttatgtattaagaaattatgatttgtcaccagtaatagatgatatgcgtttttgctcgacgtatgttgaaggtgcgtatgcacatagtggcttttctactcaatattttggtcgaacagaaggggttaacgaacatggattatctgttacattttcagcatgtggtcaaccagtaggaaacattgcaggtttaagaaagccaatggtaaatggtttacagtgttttgcggtaattcgattgttgctggagaaatgtaaaaatgtgcaggaagctaaatcactaatagaagaaataccaattgctagtaatattaatttaatagtagctgatcctttaaacgcagcacatattgaaatatttgacggtcataaatccacaacaacgattgatggtgacaaccaagcttttattgtatcaacaaaccatgcagttagttcatcaattcagaaattaaataataggaaattagaacaatctacaaagagatatcatgttttacatgagcatttaaatggatatgaacaagtgagcatagagtctttaaaaaagttagtagaagaagaatatcctgatggactgactgtacataactatgaagaatggtttggaactttacattctgtattattcgatttacatgatcgtacaatgaagatttgtttcggatcaccacttttaaacgactggtactcattgaaagttggaggaagtatgccgttttctgaggtgaacgtgaactttaaaaataaaacttatactgacttttggagggaagataagaatgaattgatgcctaaaagataaatgagataagatgataatgaagagagtgcatttacactggagggattaccaatgctaaaagttatgttaccatttgttcttatcttttttcttgttattgcgatgtatattgcttatcaaaagagaaaaaaatctgggataaaaggattgaaaagtgcgttaacttctatttgcttcttttcactcgcaattttaaatatgtttgcatattggtttcactttggcggtgcttttacttggttattttcaattgtattattgctagttggtgcatattttactaaatatattccaatatctaaaaaggtacattaaaatctataagagtttaatataatgtttactttgttttgaaaagagattattctactagatcgttgtgaaacggtttcataggataatctcttttgtttagttttggaaagaacgtactgtactttttagttgctcaataaattctcgagttgcagcacacatatatttatcttttctataaattagccctatttcaattgttggagtagggttttctattttaatagcttgaatgtttttattttgtaaaaagtctatatatggtttgggtaacactgtaattcccattcctttggaaaccatttggattaaagattccatcgtgctaatttctaaaattggtcttggtttaaagttgaatttttgacaatgagatgtaattagttcggttaaaaagaaatttttaggtaaaagaattaaagggtagttctgtaattcagcaatagatacatgattacgttcagctaatcgatgaccagttggcacgactaatgtaagatcgcttttgtatagagggatagagataatctctttatcttgcaccgggagaaatgtaattccaatatctagttcgtttcgtaataatttttcacgaatatctcctgtgcgaagccctaatacagaaagctctatattgggatataaattattgaaatttaaaatagttagtggtagtaaataatttaggacggttaacaaagcccctattgttaaggaaccttgctgtaatccgtttaggtcttgaatagctgaacgagcttgttcgacttcatgaaaaatggttttactatgtgataataaaatcttccctgcttcagttaaagatatttttttaccaattcgatcgaaaagtggcattcctacttcatgctctaatgcacgtatttgttgacttagagaaggctgtgaaatatttaatttctcagctgcttttgtgaaatgtaattcttttgaaacagctaaaaagtattcaagttgtcgtaattcgattggaatcacctcaagtataataataggttatacctatcattattatataaataattgaattgaacaatgattttaaaggttttataatcatctttatatagcagagagggttgtaaaaattaattgagagaaaatacatgtaacacctttaaaggaggaaatagaatggctaatgaatatcaattattatctttaaatataggattaccaaaagaggttacatacggtggaaaggtagttcatacaggcataaataagaaacaagtaaaggaaccggtatatttatcctttgtaaaatttaatggggatggacaagctgacttaattcatcatggaggagtagataaagcagtttgtgtttatactggtgatcactatccatactgggaaaaagaattgaatcaagatcttgtatatggggctttcggagaaaatataacagttagtggtatgagcgaagaggatgtttgtattggtgatacatttgagctaggacaggcaatcgtacaggtaacacaaccaaggcaaccttgttttaaattagcaaaaaaatataatattccaaagttaccactatattttcaagaaacaggatatacaggattttattttcgtgtattaaaagaaggatgggtatcatcagtcgacaccttaaaaagactacagtctgatccaaaaggtgtttcagtagcattcgctaaccgtattatgcataaggaaaaacaaaatattgaaggggtaaaaaggatattagaagtaaatgcactttcaaatagttggagaaagtcttttgaaaagcgtataagtggagaagaaattaatacgaaggaaagacttgaagggataaaagaataaaaatattttattataaatagtgtatttctattagtaaaagctaattagaaagcgctatttttataaaataaactaattaatatccgaaaatcttaatatttttttattcgacttattttcaaatagtcgaaacataaaattaattagactttttttttatgttttatgatagtatattgattggtaagacctctatttttaagagtaggtcatataagtatatctaatttaatggaatttaacatttggaggtacaacatggggaatgttgaaaaattggcaagtcttctaatagaagaaccgaaaagagagcagttatttcctttatttgaagaagtgtttggaattacaactcaaacattgaatgatttttcggataaaggatattgggatgatacatataaagctttatcatttttacaagaagataaagtgattgcaaatgttgcggcattttcactcccattattaattaatggtgaaaaaataaatgcggcgggtattcaatcagtaatgacacaccctaatttccgtagacaagggctaatgacacaattaatgagtaaaatgatagaagaaattgataagaaatgtgaatgtgcattattgtttacggaaaaacctgaactatatacagcatttggatttaaagttgtgcaggaatatttgatgactataccatatgataaaaatattaataataaccattcactacttaaaaagttagatttctataatatagagaatagacagttaatacatgaaacgattgatagtagccaaagactttcaaatagtttttcaactttaaacttccatccttcattttatttgaatatgtatgattcggaatggaatgagaaattgtattattcagagaaactagatgctttaatcgtttatgaagtagacaatgaaaagttgaaattatttggagtatttgcgccagtacttccggttttagatgaattatgtggagaaatcaatgaaaggtttacggaaatcgaattttatttttcaccggatcaattaggggttgaggatgtacagtttacagaattacagtctagcaagtatttaatggttcgaagtgataaagagttagattttaaaggttataaattcccagtattagcggagttttaaatatttgtataaaggttttattatggaggaactatgaatatatcatatatacctaaacatgttgagcagctcactataatgaatgtccctgaatattataaaattaatgacaagcaggcgtttattgtccgttcgaaagcagaaacagatttttggcttaaaacacattatggttttgaagtcatgaatggtcatgtattttataatgaaatgatgacagactttcaagctgaagtacaattgtgtatgaatccaaattcaaaatacgatcaagcaggtctttttgttatgatttcggaaaagtgttggttgaaaacttcattagagtatattccagatggcccttctcatttaggagctgtcgtaacgaataatggatattctgactggtcaacgcaagattatccaactgaagcagctaagcaacaacttcgttttcgaattattcgaaaacgcggtgattatacaatatatgtgaaaaagagccatcaatgggaacaaataagaatcgctcatttaatggaggatatagggaatgagcctattaaaataggtttttacacgtgtagtccttctaaaaataagggatttgagactgagtttttaaattttacaattgaagaaatatagatgaaaaaaccgtattcttttcattaagaatgcggtttttgtatttacataatataaagcacatttattgaccagaaagtcattaatacttatcatttaataatgttaaatattaatttgcataatataataaaagtaatgaagaaattacaaaaaatatcaattaaataaggagggatatgaattattcagtggtaatttcatgggaaaaggagattatgtatgaaatcatttcgtaagttattacagtatttaaaaccatacatgttcttcgctattattggaccgctatttatggtacttgaggttgcgatggacttaattcaaccgactattatgcaacatatcattgatgttgggattgcaaatcgggatttaaattatgtaataaaaatggggcttcttatgataggagcagcagcactcggtttagttggagggcttgggtgtatgatgtattctacaaaagcagctgttaatttcgctacagacatacgaaaagatgtgtttgcgaaaatagaaacattttctagtaataatcgtgattcatttggaacaggtaaattattaacgatcgtgacgaatgatatcacttccattcaatcggcaatgacgatgacattacgtgttctcgttcgtggtccactgttatttatgggaagtataattattgtttttgtaacagcgcgagggttatttccaatattacttgtagttgttccgattttattacttgcgattattttaattgcaagtaaagcaagtggtacatttaaaaaggtgcaagaggcattggacaaagtgaatacaaagttacaagaaaatttatctggtgtacgtgttataaaagcgtatgtaagacaaaaatatgaaatcgctcaattcggaagtgtaaatacaaatttaacgaagataaatattcgagctgtgcaacttatttctttaatgatgccaatcattatgctagttgtaagtggcgggattgtcgcaacattatggattggtggagaaaaagtattcaatggaacgcttcaagtaggagcgattttggcatttattaattacttgaatatcattttaatgtcacttatgtcgattagcatggtatttattcaaattgcgcgagcttttccatctgcggatcgtgtacagcaagtgttaaataccgaggttgatattataagcgcagctaatgcaatcgaacctgagaaaatcgaggggaatatcgaatttaaaaatgttagttatagctatacgaaaaataatgaatacgttttaaaagatatttcgtttagcatacaaaaaggtgaaaaagtagggattattggatcaactggaagtggtaaatctaccttagcgaaactgttaccacgtctatatgatgtggatcaaggtgaaatatgtatagatggaatagatgttaaaacatatgatttgcaaaaactccgtgcttcaatagggtttgtacctcagaaggctttgttgttctcaggtagtatagaagagaatttacgttatggtaaagaaaatgcaacacatgatgagctggaagtagcagctgcatcagcttgtgcgactgagtttatcaataagctggaagaatcttatcgatataatttaacacaaggtgcgacaaatctatcaggtggacaaaaacaacgtgtatcaattgcaagggcacttgtgagaaaaccaccgattctcatattagatgattctacatcagcagttgatgcaaaatcagaggctactattcaaacagctttaaaaacaaaatataaaggcacaacgacattattaatcgcgtccaaaatttcttccataatggatgcggataaaatacttgtattagataatggtgaattagttggcaatggtacacatgaacaattgttagaacgaagtgaggtttatcaggaaatttatctttcccaaggtggtaatttgcataaagaaggtggggaagaacatgcgtaattttcaagggcaatttgctaataaaggtggacgaaacacaccgaagatgggaaaagctaaaaatgcccaaggaactgtaatgcggatatggaactatatgggctatcaaaaagctgctctaatgtttgttatatttctagtcgttgttactactttacttggattattaggtccctattttatgggagtcattatagatcaatatattgtaccgaaagatttaagtggtacagcaagaatgtgtatgttacttatcgcgatttacggtgtaactgtacttttaacatggttacaaacatttgtcatgattaacgttgcattaaaaacaattcaaaaaatacgacaagatatttttgagaaaatccaaacgctttctttacggttctttgatgtgcgttctcaaggtgatttaatgagccgtgtgacaaatgatatagataatttgaaccaagctttgacacaaagtgttgtacaaattatttcatcagcgctaacttttataggtgtaacgattgcgatgttcgccttaaattggattttagcaattgtaactttaattacagtacctattatgttttacgttacaaaaaaactagttgcatatagtggtaaaaactttgcgaagcgtcaaaaagatttaggtgaattaaatggatttattgaggaagcaattacaggtgcggatgttacgacgttgtatggaaaagaaaaagaaactgtacaaaatttcaataaaattaatgaacagctaagagtttcagctacgaaggctgatacattttcagcttttatttttccaagtatgaactttattaataacttaggtatggggcttgtcattgggactggatcagttatggtcttaaacggaatgacaacagtgggtgttattgcggcttttattaattattctcgtcaattctcaagaccgttaagtcaatttgcgactttaatgaatacaattcaagcggcagttgctggtggagaacgtgtttttgagattatggatgaggtaccagaaattcaaaataaaaaagacgcatttgttgtacaaaatttacaagggcatgttgcacttgagaatgtttcatttggctatgcagagaataaaacgattttaaaagaagtgagtcttaaagcgcagccaggagagacaattgctttagttggcccgactggatcagggaaaacaacaatcattaatttgttaactcgcttttacgatatacagcaaggacaaattcatattgatggaaaagatataaaagattatgatattaattctttacgaagtaaaataggagtagttttacaggatacgtatttatttgctggttcgattatggataatatccgttatggacgcttagatgctactgatgaagaagttatcactgcagctaaggcagcatctgcacattcttttattaagcatttgccaaatcaatatgaaacagaaattgcttcagaaggatcgaatttaagtcaaggacaaaaacaacttcttgcgattgcacgagcaattttagcagatgcagatatattaattctcgatgaagcgacatctaatattgacacaagaacagaattacaaatacaagcaggactaaataatttaatgagaggtcgcacaagttttgtaatcgctcaccgacttaaaacaattgaaaaagcagatcaaatccttgttataaaggatggaagaattttagaaagagggaatcatgagtctcttatggaagatagagggttttattttgatctgtatacgagtcagtttaaaatttaataaaaaaaatgaggtttctctagaaaagagaagcctcatttttttatttgtaaactttatgaattacttttctaaccaaattaattatccgacctgaaaaatacttatacttgcagatacatttgttaaagagccaccatcactatttgagagagtgatagtacctgctgaagaggtgttatttattaaagtcaatgttgaaggaacaactgttacggtaaaagcagcagtaccttgatttattgaatgtggtgaccccgtaccaaaacgcccacctggaattggtgtaccatttagttcgagggagaattggttttcgcgagaagcttgtaattgaaactctgctacatatgttcctagtgtattaattataatatttccagtacctgtgatgtggctaagggcagttcctgttataggtccatttgtgttaaaagtaacactacttcctactgcaattgattggttagtagtatcaaaaacatatagatagtttgttaatcctacactagccgccccggtaggcccagtggagccagtgaagccagtaggtccagtggaaccggtagccccggtagccccggtagccccggtagccccggtagccccggtagcccatgtctttttttagtaaataggcctttgataactaaaaattcttttgtttttcagttgacatactaccgcaggtcttaaaatgtagtataatcattttaccacaaaacacgaacgatggctaaattttttaagtataatgttcgtgttatatagttgtctagatgattggttatgtaaattcaatttgccatttgaaataacattccgtaagatgagagatagagtatatttagagctggaggaaagaaagtggaatttgtatttttaggaactggtgcaggtgttccttcaaaaggaaggaacgtttcagcaattgctttacaattgttagaagaacgaggacaaacttggttatttgattgtggcgaggccacgcaacatcaaatattacatacatctgtacgtccgcgccgcattgaaaaaatatttattacgcatttacatggcgatcatatttttggattgcctggtttattaggtagccgttcatttcaaggaggaactacgcctttaacggtgtatggaccgaaaggaattaaacaatttattgaagtggcattatcggtaagtacgacacatgtgaaatatccacttgaagttgtggagataacagaagaaggtaccgtatttgaagataatgaattttatgtagaaacgaaaagattgtcacacggtatagaatgttttggatatcgtattgtagagagagatatacaaggtgctcttttagttgataagttgcttgagatgggtgtgaaaccaggtccaatctttaaacgtttaaaagatggtgaagcagttgaattagaggatggcacgatattaaatggaaatgagtttatcggcccacctcaaaaaggaagaattattactatcttaggtgatacgcgatattgcgaagcgagtagggagcttgcgcaagatgcagatgtacttgtccatgaagcgactttcgcagcagaagatgagcaacaagcgtatgattattttcattctacatctaagcaagctgcgagcattgcacttcaggcaaatgcgaagcgactaatattaactcacattagttctcgctatcaaggagatacatataaggaattattgaaagaggctagagagttgttttctaatacagaaatagcgacggatttgaaatcattcccagtagaaaaatgataattttataaaaaatggtaacggcgggttaccatttttttttgtctaaaaaaatttaaaaataaaactgttattattttatacttatacttggatgatacagaaaattaggatggtttgaatatataggataaaaatacgaaataatgattatttagaaaaactgttatataagtcagatgacatacaagtgatacaaatagcagaaatggacttttattcagaacttttaaaattcaacaaaagtaagcgttttataaaaaacaagctataatgagggcagattataatttatgataagtcacatgtattttagtcattatcgtaacaagtgaagttgactaaatcatgagagagtaacacgagaattataataggaaagatattactattatttgtcataagtctttttcactttttagctaaacgatatgattagcgagtgtatctattgcaagttccttagttgaagctttttattaataaggtggtggagatttaattggtaggtataccactctttaaaagagttcagaacatcagcaggtagtctaggtggaatagcgggtgcaaatttagttgcattagcaatggttatatcacttgtttatgctatgcttgcaatggcttctgtgttaaactttggattgctaccagactttattgtggattatcttgtatcatttttaaatgaaaataatgctaagattcttatgtattatgataactggtgttatttcaggttatattggattacttttattcaaaaactatccaattcgtatagcagaacaaattcgtggtacaactggaaaagcgacagatgtagcagcttaatagaatagtagaataaatttttttcatagaggtttagggggagttatgatgaagtatcgctcagtatttgatattatcggtccagttatgattggaccatcaagttcacatacagcaggcgcggcaagaatggggcaagttgctcgccagctgtttcgtcatgaaccagaaagagtaagcatttcgttatatggatcatttgcaaagacgtatcgagggcatggtacggatgtagcactaatcggtggaatattaggatttgaaacagatgacttacgtattccagaggcgctagaaatagcaaaagagcgcgaaattgaagtggaattcattgaagaagatgccaatgcacctcatccaaatacagcgagaattcgtttgtataaaggtgaagatgaaattgaagttgttgcttgctcaattggtggcggtaaaattgaagttgtagaattaaacggattcgatcttcaattatcaggcacgagcccagcactacttattgtaaataacgatcgctttggtgctattgcagcggtagcttcaatccttgcgaaacatgagattaacattagtacgatgagtgtatctcgtaaagaaaaaggaagaagagcgcttatggtcatcgaaacagatgaattattagcagatgaagtaattgaagaaataaaagcgcaacaaaatatttgtcaagtaactattatggaataattgcaggggggacacaccatgtttcggaacgcagcggaactagtggcgcaagctaaagaacaaaatgtaaaaatcgcagaaattatgattcaatgtgaaatggaaacaagaagtatttcacgtgaagaagtaattgctggtatggaaaagaacttagtagtgatggagcaagcagtagaacgtggtattcgcggcgtgaaatcaccaactggtttaactggtggagatgctgtaaaagttcaagcgtatatgaagagtggaaaaggcttatctggagatacgattttggatgcagtaagcaaagctgtggcaacaaatgaagtaaacgcagcgatgggaattatttgtgcaacaccaacagcagggtctgctggaacagtgccaggtgtactatttgcactaagagaaaaattgcagcctacacgtgaagaaatgattgaattcttatttacagcaggagctttcggtatggttgttgcgaataacgcttgtatttctggtgcggcaggaggatgccaagctgaagttggttcagcaagtggaatggcggctgcagctgcagttgagatggctggtggaacacaagatcaagcagctacagcaatggcaatttcattaaagaacatgcttggtttagtgtgtgatcctgttgcaggacttgtagaagtaccttgtgtaaaacgtaatgcagcaggagctgcaaatgcgatgatctcagcagatttagcattagctggtgtaacgagtacaattccatgtgatgaagtaattgaggcaatgtttagaatcggacaaacgatgccagtagcacttcgtgaaacagcagaaggtggacttgcagcaacgccaactggtcgtcgcctgcaagaagagatttttgggaagaacaataactaagtgtaaattatagaaaaaggagctcaaataaacttgagctcctttttctatttttcttttgttagttgttctaatgtttttccaagattatgtgatcgtttcgttgcctgtgtaatacaagaaacaagtgcttgttgaaatttatgttcttgtaatacttcaatacctgcctcagtagttccaccaggagaagtaatttcctttcgcaaaatagaagggtgtttgtcacttgcttttaacatttcagcagcaccaatcatcgtttgaagaataagtgattttgcaatatcttcttttaaaccaatttttgttgcagcttcttccatagcttccactacgtaataaatataagcaggtccacttccggataatgcagtgacagcatgcatatcttcttcctctacaacagagacgagaccaatcgtttcaaataaagatgttgcagtgtgaatatgttccgctgttgcatgttttgaaggggagatagcggtagctgattttaaaatggctgcggatgtatttggcattgcacgaataattggaacgtctttttgaagtagttttctaattgagtgagtagaaacacctgctagtaatgaaataataagcacgttattatttatgtattctttaaaaggggtaagcgcctctgcaacatcctttggtttcattgctagaaaaagaatatttgcatcagtaagtaattcttttttattatgagtacctttgacaccgtattttttatgtagctcttgtaatcttgtctcgttagaacgattacttacagtaatttgttcacctttaacgacatttgcatgtaacaagccaccaataatagcttcggcaatagagcctgcaccgagaaaggaaatgttttgaatagacatgatgttcctcctttaattttggttagaaattcttataaatgtacatacattcgtttttttataggaaacacctctttttatctgaaaataatgacaaatatatatagaagttgtaaactgaagaagtattcatttttgaaccggaaagagacaggggggctaagcatgacggcgattcaccgaatggagattcctgtaccatttgcagtggaaactgtgaatgtgtttttagttgagggggagacattaacattaattgatacagggacgaatacagaagaggcaaggaatgcgttagaaagtcaattaggtgcattaggacatacgatagaagatattgaaacagtagtcattacgcatcatcatgcagatcattgtggacttttaaatatattttctgagaagacgaatattattggacatccttggaatgagccttggatcacacaaaatccagaatttttaaagcggtatcatgaattttttagagagacggccttacagtttggtgtgccagcagcatttttgaaagacgagtcgttattgacgacgaggacacttaaatattcttgtaatagatcgttaacgcatactgtgagagaaggagatcgtattgattctttgcctggatttatagtacttgaaacaccaggtcatgcttctactcatatttctttatatagagaatctgatggaatattaattggtggagatgctctcatcagtcatatttcttcgaatccaatactagaaccaccatatgaagggcaaacagaacgggcacgcccattactacaatataatcaaacattacagcgtttaagcgaaatgaatatttcacgcattttatcagggcatggggaagatgttctaaatgtgaaacaacttattgaaacgagattacaaaagcaagaaacacgtgcttttaaagtgcttgagttattaaaggaaaaaccaatgacagcatttgaagtatgtgtaaaactatttccggtattatataaagaacaattaccacttactatttcagaaacggttggacaattggactatttagcatataatcaacaagtgatgattgatgaatcatcgcaacaattgatttattatgcaaagtaggtgacagcaatgacaggacgtttacaaaataaagtaatcgtcattacaggtgcttctagtgggattggtgagcaagttgcaatgcaagttgcagcacagggagcgactcccgtattaatggctcgaacagaagagaaactacaagcgttagtagacaaaattaaagaaacttataatacgccttgctattattatgtattagatgtaagtgaagagatggaagtacagtctgttttttcaaaggtattacaagaagtaggacgtattgatatattagtaaacaatgcgggatttggtatttttaaaacgtttgaagatgcgtcaatggatgaagtaaaagatatgttccaagtaaatgtatttggattagtagcatgtacgaaagcggtactaccttatatggtaaacaagaacgaaggacatattattaatattgcttcccttgccggaaaaattgcaactccgaaatcaagtgcgtatgcagcaacgaaacatgctgtattaggatttacgaatagtttacgcatggaattagcgaatacagatatttatgttacagcaattaatccaggtccgatagatacaaacttttttgaaatagcggatcaatctggtacctatgtaaagaatatgggacgttacatgttaaaaccaacatacgtagcagaacaaatcgtaaagtcgatgcacacgaaaaaacgtgaagtaaacttaccgaagtggatgggaattggaccgaaactttatgctttattcccaggtttatttgaacgtgtagcaggtaaatcattaagtaaaaaataggaggtttccatatggaaatctcctatttttttattttccagtcacataatcgtaaacgatatcctcaactgcctcgtatacatcaatttcagtatttgaatgaattatcgtttgaatatgtttaattagcatttcctgatcttcttttgatattggactgcattgatattgctgaaaactttttataatcattttctcaattaatttttcgttcatattttttcccgcctgtatgtacgtatgtattgttttattgtacttgaagtgaaataaaaaaactaccatgcactatttttgtataaaaattcggttgtgtgtaatgtttttctagtaaaattaagtttttttacttttaaaaatttataaatatttaattgactctataaatatacaatattataatcatacttaatttaaagaatcgatttgaggaggaacttatgaaagtcgcaattattggagccactggatatgggggcattgagttaattcgtttattagaacaacatccatatttttctatagcatctcttcattctttttcacaagttggtgagtgtataacaaatgtatatccgcatcttcgaaatgtcctcgttcatacgttacaagaaattgatgtggagacaatagggaaagaagcagaaatcgtatttctagcaacaccagcaggagtatcggcggagttaactcccaagttattagcagaaggtttaaaagtaattgacctatctggagactttcgtatgatagatccttcgtcatatgaactgtggtataaaaggccagcagcgaaagaagaaattcttagaaaagcagtgtatgggttaagtgaatggaaaaggactaagattcaaaaggcaaatttaattgcaaacccaggatgttttgctacagccacattgctagcgatagcaccgttagtacgtagtagcaggattgaagaagattcgattattattgacgcgaaatcaggggtatcaggagcaggtaaaacaccaacaacaatgactcattttcctgagctatacgataacttacacatctataaagtaaaccagcatcagcacgttccagagattgagcaaatgcttacagaatggaatagtgagttacagccaattacatttagcacacatttaataccgatatcacgaggaatcatgattacactttatgcaaaagtaaaacaaaagatggaaataaagcaacttcaaaaattgtatgaagaaacgtatgaacaatcgcctttcatccgaatttgtacgcaagggaaatttccaagtccaaaagaagtgagaggctcaaattattgtgatattggcatagcttacgatgaaagaacagaaatagttacggtcgtttctgttatagacaatatgatgaaaggcgcggctgggcaagcgattcaaaatgcaaacataatagcgggactagaagagacaacaggtttacaacatatgccgctttatctataagggggacatgatgattaaagtagcgtctattacaaaattagaaaatggttcaattgtaacgccgaaaggcttttcggcaattggtactgcaaatggtctgaaaaaggatttaggggcaatcgtttgtgacgtaccagcatcatgtgccgctgtgtatacaacgaatcaaatacaagcagcccctttgcaagtaacgaaggatagtataacggcagaagggaagttacaagcaattatcgttaatagtggaaatgcaaatgcttgtactggaatgaaaggattacaagacgcatacgagatgcgcacattaggggcggaacattttggattgaaagaaaattacgttgcagtagcttcaacaggtgtaattggtgttccgctaccgatggatataatccgaaagggagttgcaactcttataccgacgaaggaagaaagtgaagcatattctttttctgaagcaattttaacgacggatctcataacgaaagaaacttgctatgaaatgattattgatgggaagaaagtgacgattgcgggtgttgcaaaaggttcagggatgattcatccgaatatggcaacgatgcttagttttattacgacagatgctcatatagagcatgacgtattgcaaacggcattatcccaaattacgaatcatacatttaatcaaattacggtagatggagatacttctacgaatgatatggtcatcgttatggcaagtggattatcagaaacaaggccgataaatatggaacatacagattgggaaactttcgtatgtgctttacagaaggtatgtgaagatttagcaaaaaaaattgcgcaagatggtgaaggcgctacgaagttaatagaagtaaatgtgctaggagctcaaacgaatgaagaggcaaaaaaaattgcaaagcaaatagtcggttcgagtcttgtgaaaacagcaatacatggtgaagacccaaactggggacgaattattagcagtattggacaaagtgaagtagctattagtccgaatacaattgacattactcttcaatctatattggtattaaaaaatagtgagcctcaaacattttctgaagaagaaatgaaagagagattacaagaagatgaaatagtcattaatgtgtacttacacttaggagaagagacaggatcagcttggggctgtgacttaagctatgaatatgtgaaaataaacgcttgttatcgtacataaggagagagaagatgagcgaatatattgtagtgaaatgcggcggtagtatgttgaatcaattaaaagctgtgttttttgaatgtataaagaaattgcaacagaagtataaagtagtgattgttcatggtggtgggccagaaattgatgccaaattaaaagattgtaacatcaacgtagaaaaaagagatggattacgcgtaacaccaaaagaagttatggatgttgttcaaatggtgctatgcggaagtacgaataaaaaactcgtaatgaatttacaaaagcataatttacttgcggtaggttgttcaggatgtgacggcaatttacttcaagttcaacctgtcagtgaagagataggatatgtgggggaagtaagttatgtagaaacagccttattaaaaggattaatgaatatggagtatattcctgttattgctccaatcggggtaaatggtaatgaagtttataacataaatgcggacaatgctgcagctgggattgcggctgcgttaggggcaaaagagcttatttttattacggatgtagatggaatattacatgaagggaatttggtaaaggaaacggatgaatctgaaattgctacttttatagaaacaggtgttattacaggtgggatgattccgaaagtacaggcggcactagcatcattaaaaatgggagtgcaaaagataagtattgtgaatggtacaaaagattttactgaggttacgggagagtgtattggaacgacggtaacgaaaggtgtgagtattgcatgacgagtcatctttttcaaacgtatggcagaagaactattgagtttgtaaagggaactggaacgaaagttattgataataacggtaaggaatatttagatttcacatcaggaattggcgtatgtaatttaggacattgtcaccctactgttctcaaaggtgtacaagagcaacttgatgatatatggcatatatctaacctgtttacaaacagcttgcaagaagaagttgcgtcattattaacagaaaatagagaattagattatgtgtttttctgtaatagtggggcagaggcaaatgaagcggctttaaagttagcacgtaagcatactggaaaatctctcgtcgtaacatgccagcagtcttttcacggtagaacatttggaacgatgagtgcaacgggccaagataaggtaaaagaaggatttggtccattacttccatcttttttacatatcccttttaacgatattaaagcattagaggaagtaatgaatgaagaagttgcggcggtaatggtagaagttgttcaaggagagggaggagtaatacttgctgatctatcttttttgaaagagattgaaacattatgtaataagttcggttccttatttattatagacgaagtacaaacggggataggaagaactggaacactattcgcttatgaacaagtgggaatagagcctgatatcgttaccgttgcaaaggcgcttgggaatgggattcctgtcggagcgatgattggccggaaagagctcggagcgtcgtttactgcaggatcacacggttcaacttttggcgggaattacatcgcgatggctgcagcgaaagaagtattgcaagtaagtgaaaaaccatcgtttttaaaagaagtacaagaaaaaggcgagtacgtattagagaagttgcaagaggaattacagcatgtcgaatgtattcaaaatatacgtggtaaggggcttatgattgggattgagtgtaagcatgaagttgcaagttttatagaacaactagaaaacgaaggacttctcgtattacaagcaggtcctaatgtgataagactattaccgccactcattgtcacgaatgaagagttagaacaggcagtatatataataaaaaaagtagtttgtacaaaaaacgtatcaatcatataagggggaagtttcatgtcaactgtacaagtaccgaaattaaatacgaaagatcttttaacactagaagaattaacgaaagaagaaattatttctttaattgagttcgctatatatttaaaaaagaataagcaagagcctttattacaaggcaaaatattagggcttatttttgataagcattcaactcgtactcgtgtatcttttgaagcaggaatggtacagctcgggggacatggtatgtttttaagtgggaaagagatgcaaatgggaagaggagaaagcgtttcagatactgcgaaagtattatcgcagtatattgacgggatcatgatacgtacattctcacacgcggatgtagaagagcttgcaaaagaatcgagtattcctgttattaacggtttaacggatgatcaccatccttgtcaagcattggcagaccttatgacgatatacgaagaaacaaatacatttaaaggaataaaattggcttacgtaggtgacggaaataatgtatgtcattcattgttgctagcgagtgcaaaagtcggaatgcatatgactgtggcaacgcctgtagggtatgaaccgaatgaagagattgtaaaaaaagcgttagcaattgccaaggaaacaggagctgaaattgaagttttgcatgatcctgaattagcggtgaatgaagcagatttcatttatactgacgtttggatgagcatggggcaagagggcgaagaagagaagtatactttatttcaaccttaccaaatcaataacgaacttgttaagcatgcgaagcaaacatatcgtttcttacactgtttacctgcccatcgtgaagaagaagtaacaggagaaattatagatggaccgcagtctatcgtctttgagcaagctggtaatcgattgcatgctcaaaaagcgttattagtgagtttatttaaaaatgtagaagagccttcctaaaagggaggtttttttatattaaaatgtcggatgtatatttggttaaccatttcgatatcatttataataaaagagaaaactaaatttgtttttcagagtgtgtaaggacatactacatataaaaatatagttaaagagatgatgagggtgaaaacaactaagaaaacatattcgtttttccagcggatgtggagaatattaaagtttcaatattataagttgcttcgatcgccagaaggcgcaaagaaagtatcgttagggtttgctataggattcggcttagaaatgttagtcatttatacggcatcgctcgtatatgtaatattttatccaatcgtcaggttagcaaagggatcttttcctgcggcagttattggcaatattattgggaaaatatcgtttctcccagtatttttatttccgcttgcgtatgcgctaggaaaaatgatttatccatttcatgtacagaaaattcatcatgaaccatttacgatatcggacttgttttcaagtcacatttttacgatattaaagagcttattacaaagtgaagtgtatgtattaattggaatgacgattttaggagttgtgtttggtctcatttcatatttcgttgtgcattatttatacgaaaagaaccgtaagttacgtttgaagaaaaggaagaaacgagtgagagaaccacttgtacaattataaacaatgtcacattcattttctcctttgaatatgtttaagaaaaaggaggagaggataatgtattattattacgtacctcaagtatatccatatgtaaattattatccggtttatgatacgagtagacaatacgaattatatcggcaacaacaattacagcaattatcacaaataccacaattaccaacacaacagcctacacaggaaaaaaaaccatatttaacaacatggccatattccaatgtatactatggtaattattacgaatcataaagctgcttctatttagaagcagctttatacgtttgttttcaaaattaaattttgaatggtttgaagagaatgaatgagcttttcgcgctcttcctcagataatgtttggaaattttcttttagtttgtctaaaatgaattgctgatactgatttactaataatttcccttcagctgttagagaaattaaaatgacccgtcgatctttttcgctataatgacgctctattagttcttcttgaataagtttgtttaatagaggtgtcatgttaggccgtgaaatcgctagccgcttgccgatttcggaaactgctaatgtgccgttttcatgcaaaagcagtaatacttgtgtatgtgatggcggcatatgtctttgagaagaaaattctccaggaagcataaatttgcgataaaaaagaggcactagcgaaagaagatgatcaacaatacgttcccactcgcgtgattccatataaaggcccccttccactatcattgtaacaaaaaagacatgttataaaaatagaattgtttcatggtcgctttaatatttgtaggataacacttgctttgtaaatgtattggcaataattgcatagccgttatcatttgggtgtacttggtcaaataataactcttttttatcatttgatattaatttgcgaattggtaaaacgatagatggttgatttgctttggaaatggaataaacagattcattccagccatctaaaaacatatctgcataacttgcgatggagtcatcgagttgtaacgggttatagagttctgagagaatgagtaaagcgtccggattttgatctcgaactgtctttacaatactttttatatccgcttcaaaatgggctttttctttatttaacatttttataccatctataacaccaacatcacgatttaaacgaaataaattatttcctccaatattaattgtaattatatttgctgctctaattttttcctttacatcttctgattgaacttttttagcgagacgatctgttgtaagaccgtttaccccaaggttttctactgtaattggtttatgaatttgtgcttctatttgcttagaagctaattcagcaaatccaccttgtgtcgatccatatcctttagcgagtgaatcacctaatacaagatgataaaaagattcgtttgtttgcttatcaatccaatttggggcagatgttttttctgttttttcttcagattcattttgttttgtctcgtcgttcttttcaaaataagaataagaaatgatcagaaggaggagacaaacaattgttaagatgacttttttcataaattcatcctccttgtaattggtaattgtatcatattcagcagtattagcaatgtaagggcatattatatgtttatgaaaagtttataataactttacagaaaatttgttgaagtttgtcaaaaaatattgacgataggaaagaactttatatatgataatgtcagataaggtgaaactttaatgagtgggagctttatttcctattaattgttagtcttcatcaatcgggcgtttaaggggactactcgttagcgcaggatgaaatgaaaattgtgtctctaatagaagaaaaaaggtatgtggttagagacagatagggattcatttcattatttctggtaattgtataagggggattttttgtgaaaaagtcaaaaaaaatgctggctggagcaactcttgcgattggtgttatagcaccgcaagtaatgccagcaacagctcatgcagatgagaacactggggagagtacagttaacttacgaattctagaaacatcagatattcacgttaacttaatgaattacgattattatcaaacgaaaacagataataaagtaggtctcgtacaaacggcaacactcgttaataaagcacgtgaagaagtgaagaactctgtcctatttgatgatggggatgcattacaagggacaccgcttggagattatgtagcaaataaaataaaagatcagaagaatcgtgtggatcctagttatacacatccattatatcgtgtaatgaatttaatgaagtatgacgtcatctctcttgggaatcatgaatttaactacggtttagattatttaaataaagtgattgaaaaaacggatttcccggttattaactcgaatgtctatatagatgaccatgatggtaatgatgagaatgacgagcattactttgataaaccatatcatattttagagaaagaagtagtggatgaagcaggccaaaaacaaatagtgaagattggtgtaatgggatttgttccaccacaaattatgaattgggataaagcgaatttagaaggaaaagtaaaggcaaaagatattgtgcaaacagcgaaaaaattagttccggaaatgaaggcgcaaggtgcggatattatagttgcactagcgcattcaggtgttgataagagtggatacaacgaaggaatggaaaattcatcgttttatttagcgacagaagttcctggcgtagatgcagtattaatgggacattcacatactgaagtgaaggatgtatttaatggtgttccagttgtaatgcctggtgtctttggaagtaacttaggtattattgatatgcaattgaaaaaggtaaacggaaaatgggaagtacaaaaagaccaatctaagccacaacttcgcccgattgctaatagtaaaggtaccccattagtagaatctgatcaaaaattagttaatgaaattaaagatgagcatcaagcgacaatcgactatgtaaatacacctgtaggtaaaacgaaagcaccaattaatagttatttttcattagtacaagatgatccttccgtacaaattgtgacaaatgcgcaaaaatggtatgtagaacaagaacttaaaaaaccagagtacgaagagattaaagatattccggttttatctgcaggcgcaccatttaaagcaggtggccgaaacggtgctacatattatacggatattccagctggaacgttagcaattaaaaacgttgcagatttatacgtgtatccaaatacgttatatgctgtaaaagtaaatggggcacaagtgaaagaatggcttgaaatgtctgcaggtcagtttaatcaaattgatccaaagaaaacagaagaacagccgttagtaaatataggctatcctacatataactttgatattttagatggcttaaaatacgaaattgatgtaacacaaccagcgaaatacgataaagatggaaaagttgtaaatgcaaatacgaatcgtattgtaaatatgacatatgaaggtaagccagtagctgatgatcaaaagttcatcgtcgctacaaataactatcgtggaagtagtcaaacgttcccaggtgtaagtaaaggggaggttgtataccaatcacaagatgaaacacgtcaaatcattgtgaagtatatgcaaaaaataaaaaatattgatccagcagctgatcaaaattggacgtttaaaccgattgttgcagataaattaaatacaacatttgattcttcaccaaatgcacaaaagtatataaagaaagatgggaacatatcatatgttggaccatctgaaaatgaatttgctaaatatgcaattgatataacgaagaaaaatgatgataaagaaactggtgaaggaaatccaacgacaccgccaacaggtgggggagaaaatccaacaacaccgccaacaggtaatggagaaaacccaacaccaccaacagaagaaggtaataatggtaatgaaccaaaacaagatggaaacaatactggatctggacaaactacaacagatgatcaaaatacaaaagaaacaacaacaactgtaagtgaaaataaagaagctgaaaaagatgaacgtgatttaccgaaaacaggtgcaagtattgcttctacaattggagcgggtcttgcgtttgttggagcgggattacttatgttatttagaagaaagaaagcgaatagatagtcgagaaatataaaaaggattaccgatttggtaatcctttttattatattatgaaactggtactgctttttcttttttccatgaaagaccgaatccagtaaagccgacgataatggttacgactggacatgctaaacagaagattgcgtatggcaggtaatcgaatgttggaacgctaagaacgtttgttaagaatacgccacttacaccccatggtacgagtggattaattactgtaccagcatcttctaatactcgtgataaattacgacgttctaaaccgacttcatcgtatttattagcaaatgcttgtcctgttaaaacgatggataagtactgctcaccgagtaagaagtttacaccaattgcagttgaagcagtagaaataattaagcgtgtactagtttttacgaagctagagataatattcatcagctgcgctataatacccattccttgtaataatcctcccatacaaagagctaggaaaataagagcaattgacatcatcatactttgcaggccaccgcgagataataagctatcaatatctttgataccagttttagaaacgtaaccgtcttgcataatttttattaaatcagctaaagaagtgctaggtttaaaaataaagagaataataatccctaccacaattcctgcaagtaatgttggaactgcgggtacctttttaaatgcgaataggaacagtaataaaataggaatcagtgtaacgatagaaatcgttgcatttttttctaatgtgttaataaatgctgagaaatcaacgtttccaccagatccgcttcctaaaatgaaaaatgcgataaaagcaataatgaaagctggcactgttgtccaaagcatgttacgaatatgttcaaataaatctacacccgttacagcaggcgctaagtttgttgtatcagataaaggagacattttatctccgaagaatgccccagaaataattgccccagcaataagagctggatcgtatccaagggcagtacccattcccataaaggcaagtcctacagttgcagcagttgtaaatgcactaccgatactcgttccaacaattgcacaaacaacaaaaacagttggaacgaaaatttttggagatacaagttggaagccgtataccattaaagttggaatagttccagctgcgatccaaatgctaattaatacgcctacaagtaagaaaataaatatagatggaataccagctgaaatactacttatcattcctttttccatagtagaccaatcaatttttttcataaatccaaacgctaataaaagaacgatgccaaataaaatcgggatgtgtggtgaaacttctaatttgataacactaaagccaatgcagaaaaagataaaaattgttaaaagaacagactcaatttttgaaaccattgttttcccctcctaagtaatgtgaaatagctcttttttatataaaattcgccaatattgtatatttccttctaaaatttagaattttgtgacaaattaccggtaattgttagttcttctatatgatgcggaaatgattggataaaaaaacgtccctgcatataattatgcagggacgaagaaatcgcggtaccaccctagcttgtgaaatgaatgtatcacaaaataaagggtcatatgatatgcgcttataaaataaaaaacgcccctgcaatatatgcagggacgaaaaattcgcggtaccaccctaaattgtgaaacagtgtcgtttcaccactctttagacataacggtctataaccgtccttcactactcctcacgtttcgtaaaagaagctccagggggtaattcataattcgctctgtactggttcgcaccgaccaccagctctctgaaatcagaaatcgaaatactactaaatcctatcaacgccgattcatatgatgttagttaaatttttatcatattttcatcttacatgtcaataaaaatattaaatgtttttttagggaaataaaggataattgtttttaacgctgtaaaaatgtacgttataatgaatttgaaagggggaggaaagagtgaagaaaaaaataattctttttaccactttattagttattggaggaagtgctggaatttacacagcttttgcggctgaatcagagcagttgaaacaaaagcaaatacaacagtcagaagtgaagaaagcgaaagaagctgaagagaagaaatcaatggaaaaagcagcagagaaactaggagtttctactgaggggaaaacaaaagaagaggttacgaaagaagtaaataccgctaggtttgataagcgtcatgatttattaattgagcacgctaaacaacttggaattgatacagaggggaaaaaagatgaagaaattattttagaaattggaaagatacagcatggaaagtagaacaacttatcatatgataagttgttcttttttaagaactatttgattttaaaataattgacagtcattcagatttaatgttaactatatttataaacaagttaacattaggggtgacaattgtgacaataaatagtaaaacgattgaaaaatcatcttatacatatgaagaattagcagagaaaaataaagcttacgtatggcacccatttacacaaatgaaagattatttagaagaagatcctgtcattattgaacgtggagagggaagaaagctatacgatgtaaatggtaatgaatattgggatggtgtttcatctatatggttaaatgttcacggacatcaagtaccggaattagatgaagcaattcgtgagcaattaaataaaattgctcattctactatgttaggacttgctaatgttccatctattttattagcagaaaaaattattgaggttgtaccagatggattgaagaaggtattctattctgattcaggttctaccgctgttgaaattgcaattaagatggctttccaatattggcagcataaagggaaaccaaagaaacaaagattcgttacattaaaagaagcatatcacggtgatacaattggagctgtttcggtaggagcaatagacttgtttcaccaagtgtatagttcgctcttatttgatgcgattaaaatgccgtatccatatacatatcgttctccttacggaaataataaggaggaaattgtaaaaagccatttagaagaaatggaagaattgttgaaagaaaagcatgaagaagtagctgccatcattgtagagccattaatgcaaggtgctggcgggatgattacaatgccaaaaggatatttaaaaggactgcgcgatttatgtactaagtacaatgtattatttattacagatgaggtagcgactggatttgggcgtactgggaaaatgtttgcatgtgaacatgaaaatgtgacgccagacattttaactgctgggaaaggtttaacaggtggatatttaccaattgcagttacggtaacgacggatgaaatatataatgccttcttaggagaatatgaagaacaaaaaacatttttccatggacatagctacacaggcaatccgttagggtgtgccgtagcaatcgcgaatctagaactatatgaaaaaacaaatttaatagaagaagtggcacgtaaaacggattatgtggcagcgcaattagaaaagctctttgcgtataaacatgtaggtgatattcgtcagtgcggattaatggttggtattgagcttgtgaagaataaggaaacgaaagaagcgttcgactggacagaaagagtcggtgttcaagtatgtaaacgctcaagagagctgggtatgattttgcgcccgctcggcaacacgattgtatttatgcctcctcttgcttctacaattgatgagattgacgatatgttacgtattttatataaagcaatctcggatgttacggagggagaataatgagcggtttttttataacagcaacagatactgaagttggaaaaactgtagttacaggtgcattagcaggtgtatttagagaacttgggtataacgtaggggtgtataaaccgttgcaaagtgggcatgttgcatcaaaccctgagggagatgcggcaaggttaaaagcattatcaggtgtaccgacacaagaaaatgaaatttgcccttattctattgaagaaccacttgctccgagacttgccatgaaaagagctggaagagtagtaaagttaaaagaaattactgattactataatgaactattaaaagagtttaatagcttatttgtagaaggggcaggtgggcttgctgtcccatatacagaagatgctttagtaattgattttgcaaaagaattacagttgcctcttattgtagtagctcgtcctacattaggaacagtaaatcatacagtgttaacgattgcttacgcaaaggcgcatggcttaaccgtagcgggtgtcattttgtcaggttgcaaagaatgtgaaatggaaagagtgcaagaaaataaagagatgattgaagagctgagcggggtaccagttttaggattattaccattctttgaaggtgagtttacgaaagaagaagtattagaatctgcaaaagaacatattatgatttcaaaattagaggagtttatccaaaatgaatcaaacgtggcgggcgcaccttcaatctaaattacaacaattacatgagcaagggcagtatcgtgatttgcatgtaacagagaaggcagaagagacttggcttattcgagataaaaaaaagatgttaaatttagcgtcaaataattatttagggttagctggagatgaaaggttaaaagaagctgctattgcctgtacaaaaagatatggaactggagcgactgcctctcgtctcgttgtaggaaatcatccattatatgaagaggttgagagaagcatatgtgactggaaaggtactgaaagagctttaattgtaaatagtgggtatacggcaaatataggtgccatatcttctttggcctctcggcacgatattgtttttagtgataagttaaatcatgcaagtattgttgatggaatcctattaagcggggcagagcataaaaggtatcgtcataatgatttggatcatttagagaagctgttgaaaatggcttcgcctgaaaaaaggaaattaatcgtaacagataccgtttttagtatggatggtgatactgtgtatttaagagatttagtacagctgaaagagaaatacggggcaatcattatagtcgatgaagcacatgcgagtggaatatatggaatcggcggagctgggttatctcatatagaaaaaaatcttgctcaaaaaattgatatacatatggggacgtttagcaaggctttagggtgttatggtgcgtatttgacaggtgatgaaatttatatagagtatttacaaaatatgatgagaagctttatttttactacagctttaccaccaagtacgttaggagcagtgcaaaaagcaattgaaattgtaaaagaagataacgaaagaagagagaaccttatagcaaacggagaatacttcagaactaaattaagggatgctggttttgatattgggaatagttcaactcatattgtaccgattgtagtcggttcaaatgaacatgctttacgatttagtaaaaggttgcaagaggcagggattgcggccattgcaattcgtccgccaactgtgccggttcatagttctcgaattcgctttgcagttacatcgcaacatacaatagctgatttaaaatgggctattgatcgaattattcacattgcgaaagaagaggagattttcgtatgaacgagctaaagattatttttatccccggatggggaatggaagagaatatttgggatttagtacttccgtattttaaaggatatcctgttgaatgcatagattggcataatgtgaaagaacgaagtgaatttgcggaacgaattatagatgtagcgcataacgacaacgtaattttagttggatggtcactaggagcgttagcagcagttgaagcttataaaaagattcaggcaaaaggcatcgtattaattggtgggaccgctaaatttacaaatacgagtgactatagtaatggatggaatgctttgcatgtagaacggctgaaaaggaatttggtgagaaggaaagaagatacgctcaagcggttttatgaaaatatgtttacgaaagatgagctaaaagagaacaaaaattttgaagacattgtagaccattttaaaggtgattctattcagtctttacaactaggtttggattatttaatagaaacagatatgagagaagaactaaaagaaattaaagtacctatactacttatccacggagaacaggatgtaatatgcccattgtctgcggcacgtagtatgacggagaatagcagcagcgagctgaaagtagtaagtgaagcagggcatgcattatgtgtaacgaattttgaatattgcgcaaatgagataattcaatttgtagaggggatacgacatgatcaacaaaacgttactacaaaaacggtttaatggggcagccgtatcttacgatcgatatgcaaatgtacaaaaaaagatggcacattcattactttcaatcttaaaggaacgatatagtgaaacggcatcaatacgtattttagaactgggatgcgggacggggtatgtaacagaacaattatcaaagttatttccgaaagcacatattacagcagttgattttgctgaaagtatgattgcgattgcgcaaactagacaaaatgtaaaaaatgtaacgtttcactgtgaagatattgagcaattacgattagaagaatcatatgatgtcattatttcaaatgctacatttcaatggttaaataatttacaacaagtgttaagaaatttatttcaacatttttctatagatgggatattactcttttcaacgtttggacatgaaacatttcaagaattgcatgcttcgttccaacgtgcgaaagaagaaagaaatataaaaaatgaaatatcgattggtcaacgtttttattcaaaagatcagttgcttcatatatgtaagatagaaacaggggatgtgcatgtttctgaaacatgttacatagagagttttacagaagttaaggagtttctgcattctattcgaaaagtaggagcaactaatagcaatgaaggatcatattgtcaaagtccctcactctttcgtgcgatgctacgcatatacgaaagagacttcacgggaaatgaagggataatggcaacgtatcatgctttatttatacatataacaaaagaggggaagagatgaaatgaaacaagtacaaacaaaaagggattggaaaaaacttgcatacgacgtagtggaagagaaaatgattacgaaagaagatgcaatagcgatattagaagctgatgatacagaagttttagaaattatgaatgcagcttacattattcgccatcatcactttggtaagaaagtaaaattgaatatgattattaatacgaaatctggattatgtcctgaagattgtggatattgctcacagtctattatttcagaagcaccgattgataaatatgcatggttaacgcaggagaagattgtagaaggggcacatgaagcaatacgccgtaaagcaggtacatattgtattgtagcgtctggtcgtcgtccgacggataaagaggtaaatcacgtaattggagcagttaaggaaattcgtgaaacgacagacttgaagatttgttgttgtttaggtttcttaaatgaagatcaagcaggacgtttagcggaagcaggcgtgcaccgttataaccacaacttaaatacacatgcaaataattacgatagcatttgttcaactcatacgtatgatgatcgtgttgatacagttcaaaaagcaaaacaagctggtatttcaccatgctctggagcgatttttggcatgggagaaacaattgaagagcgtgctgaaattgcatttgaattacaacgtatagatgcagattctatcccttgtaatttccttgttgctgtaaaggggacacctcttgaagggcaaaaagagttaacgccagtagaatgtttaaaagtacttgcaatgatgcgttttgtaaacccaacaaaagaaattcgtatttcaggaggacgtgaaatcaatttacgttctgtacagccaatcggtttatttgcagcaaattctatttttgtcggggactacttaacgacagctggacaagagccgactgcggactggggtatgattgcagatttaggatttgagattgaagaatgtgcattataagatagatgaaaaagcaaacttgtaaaagagtttgcttttttgtaaataaaatgtaataaatagttgtgaacgcttgatactattggtttttgaacgaaaaaaagaatttttgtggacgaattttccaagccctagttgtacatagtaaatatgtaatttatattgggttggaggattttacatgtacaaatacatattagcgattatgacttgtttaattttaataaaagcaataagttctgatccagttaaggctaccgaaaatcctgaacaaaaagagatgcaacaaagaatcgaacaacactttcgaacgaaagctgaacattttggattgaaaacggaaggaaaagatttaaaggaagttagaaaagaaattactattatagaagaagcgaaaaaaagagagaatgtatggagaacagcgcaagctcttcatataaaaacagaaggaaaaacgatgaatgaattaataaaagatgtacaaaaaaaggtgaaaaaataaaaagaggccgcagcctctttttttatgcccattgttttgataagtgagccatttcaattgcagcaacagctgattcatatcctttattaccagctttcgtacctgcgcgttcaatcgcttgttcaattgtttctgtcgttaatacgccgaaaataactgggatgtccatttgtagtgataaagacgcaacaccttttgctacctcattacaaacgtaatcgtagtgagttgtagcacctcggattacagtacctaatgtaataacagcatcatactttccgctactagccatctttttagcgattaaaggaatttcaaatgcaccaggaacccaagcaacatcaatatcactttcttctacaccgtgacgctttaatccgtctaaagctccgccaagtaacttacttgtaataaattcgttaaaacgtccaacaacaactccaacttttaatcctgtaccaactaaatgaccttcgaataccataataaatctctcctttaattataagtttagtaagtgtcctaatttatttactttcgtttgtaaatacgatttattctcttcttttgccggcatttgcaacggtacacgctcgactacttctaaatcgtaaccttgtaagccagcaatttttcttgggttattcgttaataatcgtaagctttgtaaacctaaatcttttaatatttgagcaccgataccgtaatcacgaagatcagcagggaagccgagtttttcatttgcttctacagtatcgaatccttcttcttgtaatttataagcgcgaagcttattaagaagcccaatgcctcttccttcttgtctcatataaagaagaacaccttttccttcacgctcaatttgagcaagtgctgcatggagttgtggtccgcaatcgcagcgatgtgaaccgaatacatctcctgttaagcattcagaatgaacacgtacaagtaccggttcacctgttgaaatatcaccttttacaagtgcgatatgttctttcgtatctaatgagttagaatagccaattgcgtggaaagtaccgaaatctgtaggtaatgtaatttccacttctctcgtcacaagtgtttcatgatggcggcgataagcaattaaatcttctattgtaatcaattttatatcaaattgttttgcacattctattaaatcaggtacacgtgccatcgtgccgtcctcatttataatttcgcaaataactccagctggttcggcaccgcatagctttgctaaatcaacagcagcttctgtatgacctgcacgacgcaggacaccgccttctttcgcaattaatggaaagatatgtccaggtcgattgaaatcagcgccttttgatgcggggtttaacaattcttgtatcgtagttgcacgttcgtgagcgctaatccctgttgttgtagaaacatggtcaatgctcactgtaaacgcagtatgatgtgaatctgtattatgagataccattggttctaattgtagacgttccgcgtaccctgctgtaatcggtacacaaacgagaccacggccatgtgtaatcataaaattaattgtttctggtgtaatgtactctgctaaagcaataaaatcgccttcattttctcggttttcatcatcacatacgataacgactttaccttgttttaaatcttctagagcttcttcaatacgatgaaacattgtgcttcccccttatagaaatccgttttcttgtaaaaagctttcagtcattgaacctactcgttttgtaggtttagtaataaagcgttcgatatatttaccaatcatgtcacactcaatgtttacgatatctccggcatttttttctccaatgacagattcgcttactgtgtgcgggatgagtgaaatcgttatggaagattcgtctatagcaaatatcgttaaactcgttccatcaacagcaatggaccctttctgcaaacaatagcgcagcagttcatcagaaattgctattttgtaatagacggcattgtaatgttgttttttatttaaaatcgttccgatgccatcaatatgtcctgaaacgaaatgtccaccgaatcgtccgtttgcagccattgctcgttctaaatttactttagagtgtggtttaagtatacgaagtgatgtcgactgcatcgtttcgggcattgcatcaactgtaaatgaagtagttgtaaagtttgttacagttaagcaaataccgttaaccgcgatactatcacctaagtgaacatctgataaaattttctttgcatgaatcgttaatttcatcgcttctccactttgttgcatgtttgctatcgttcctaattcttctacaattcctgtaaacatttcgtcacctcgtttcgggcattcgcaacgatttttatatcatcaccaatttgtttcatctcttgaattttcaaggaaagcgcatcttgtaattttgaaaaaccatttcctccaaataaagtaggagcatctttcccaccaattaatttcgggcttatataggttacaatttcattaaaattgtttgtttttaagaaacttgcatgaatcgattggccaccttcaacgaatagagaaagaatttgtttctctccaagaaaggaaagaaggtcctcgatttctatatgcttcgtttccatttggaatatagctatatttttagattcataagaagatatcttctctttctttacatccttaccgacaataatccatgtcggtgctaaaccatctgttataacatgagaagatggtggcgttcgtaaatgggtatctaaaacaacgcgaataggatgtttcccaccatttggaattcttgttgttaaatgaggattatcagctataactgtattcactccaacaagaattgcatcatgtgtatggcgatattggtgaacatcagcacgtgcttcttcacctgtaatccacttactttcaccagttacagttgctgtttttccatctaagctcagcgctgttttgattgttacaaaagggcgtttcgttttcatgtagtgaaaaaagtagcgatttaataaaactgcttctgcttcaagaacaccagtagttacttcaattctagcttcctctaatcttctttttccgttaccagaaacgagcggattacaatcgagagtagcaattacaacacgcttaactcctttttcgatgagcaattcacagcaaggtggtgtttttccaaagtggctacacggttccagtgttacataaacggtagcgtctttggcgttctgaccagccatttgaagggcatgaacttctgcgtgttcttcaccagctcgtaaatgagcgcccataccaacgatgtttccatcttttacaacaacagcaccaaccataggatttggacttgtttgtcctgatgttccttctgctaactgcagggcaatcctcatatattcttgatctgtcattttcttcacctctccaaaaaaaatcaaaaaaccccaaggatttaatatccttggggtttgggagacgtgatttctagaaatatagtttgaatacgaaagcataggaaagaaacctaacgataattgatatttctgcataaggaaaaaacctagcaaaatatcgaatttttaaacgctagttgtctctttttatttcagtataaaaaataagtatagaaaattaaacatatataaagaatcaaaatgaatctttaaaaatatgcatactgaaataaaagtgtattcactatataaaaaactagaaacatatccttctcccatccagactatactgtcggccctagagtttcactagatccaccgttttcgagttgaaaacgggtcacggacttagaagttttcacttcatcaccgccggttgggaatttcacccgaccccgaaggatgctgtttgctcaaattatagcacaaaaaaaataaaaggctagtaaaaaatattcgaatgtgaagaattgtgtgaaaatatatgcaggctggaatggaaataaaagtattagaaatgttgtaaagagaagggatataacggagttgctaaaaagaaaaaacatgcacaaaaaaatgtgcatgtcacatgtaaaattattctgcctctggtgctctaacaacagactcgaatttacctttatgcgaagcgtcgcaataaggcatattttttgataaaccacaacggcataaagaaaatgccggttttgctgggaatgcattcccttgtgagtcgactaattccacgtcccctgtaacgcgaaaagagccattatcatttactttaatttgtacttttgccaacgttatccctccttcccaaacgcttaatttcatcatataatcaagggaagtgcttggcaatataaagtgaaactttaattagtgggggaggcatcccccactaattattagttgaaccaatcgggcttttaggggcagttaatctcctacctaacttctttgtttcagccgaattttgaggtgggagttttactgcccgcaaatagcggagaaaaaagagcactttgtttgagaaagaagagagtgttataatagttttcataactgactagagtaaggtgacgagagatggataaacaattacatacattacgaaacattgcaaatgagcgcacgtgggcatcatttttgaatgataatcatccatatagtttgttacattggtccattgcaggtgtagggcaagaggcaaaggatgtttggttactgcaagatgaagtaacatttcaaacgacagaattcccaacgttagatgatgcaatgcaatggatttctgaaaatatggaacaagttacagacgttttagcgcaataaaaaacaggcttatgcaagcctgttttttgtttctttcacatatgtgtttaaaaattgatcgacggctgcttcgtactcttctttattttcgttataagagcaagcgtgtgcaccgtgttctgcaatataaagctgcttattattttctttcgcttcatataacgcttttgtcatatcagctaaaatatagtcgtcatctttactatgaataaagagaacgggattgttaatgttttttatacagtcgattggtgaaacttcacgaattgtataaccgtcacgaactttcaaaaatgcgtttgctaaaggtaataaaggccattttggtaaatggaattcaacctttaaacggtgctgtaattgtccgtgaaaatcagagaaaggacaatctgcaatatagaaatcagcaccatcttctacaagtcctgcgtattgaagaagtgttgcagctcccatagattcaccatgaataccaagtgtaatattggtgccaaaacggttttttagccagtcaactacggattttaaatcatgtttttcatagtatccatagcttgttgtttttccgccagttttaccatgacgacgatgatcgtaaatgaggacgttatatcctctttttaagaataagtttgcatattttacagagtttattttatttacagttacaccgtggcaaaaaaccataaacttattggtggaatgaccagcaggaatgtaatatccgtgaaggtcgtatccaaattgtgaagggatatgaatttcttctttatgaagagcatcaaaatcctctatacgaaaatgttttttcgtttctctttcgagtacttcttcctctgtttttttctttaagtacatcactttatttgtaaagaaaatcccaagggcagttattgcacctagtatagtaaacagtgctgcaaaaaaacgtttcatactttacctcatcctccaaataccgttacatgtgatacacttatattgtatcacaatgatataaaaggggagaaataggaaatgctgcatatacaaaaaattacgccagcgatgaaagaaacaatccgaatgttcatgtgtgagaactggggaagttcattgatggtttcacgtggtaagggacatcagttagaagagttgccaggatttgttgcgctctcagatgacagaataatcggaattataacgtatgaagtgaccagaaatatgtgcgaaattgtatcgctagatagctttgaagaaagaaaaggaatagggacgaaacttgtggattgtgtattacaagttgcagaaggagaacggtgcagacaggtttggcttattacaactaatgataatatgaatgcgttacgattttaccaaaaacgtaattttgtaatgactaatttatatgtgaatgcggtagaggaggcacgaaaaataaagaaagaaattccacgtattggatatgataatatcccgattttacatgaaattcagttggagtatcgtttagtgaaatgatgtaacaattttcagaaatatgagttgttaatcttgacggatagtttaatttaggttaccgtaaaattgtaatctattaccatattaaggggtgacgatgtggcaactatacgtgatgttgcaaaattggcaggtgtttcagtcgcaaccgtttcacgagttattaatgaaaaaggatacgttcatgaggacacagtaaaacaagtaaaggaagcaattgaagaattacgttataggccaaacagtgcagcgaagccactatttaaagaggattcaacgataattgcattacttgtagataatttatgtaaccaatcaaacatcactttgctacattgtattgaggaaatagcatataaagaaggttatcaaatcattatttgtaatatagagaataaagatagatacatacatatgctgaagcaaaataacattgcaggtgttattttgacaagagcagtttttaaaagtgtaggaaaaattccatttccgtttgttgtgatcgatgagcaacaatcacatggaaattattatgaaagtggacagagagctgtttctttattaaaagagaaagggtgtcactttcttgcatatttcggtgagggagaagaaagtgaagaaatggaagatcatatagcagggtttttagacgctgtttgggatgaaggaatctcttatcgagaagaatgtgtacaagggtatacaaataaacaatttattacattattgcaaaacaatccgtatgtagatggaattgtagcctcaagtgatcagattgctattgatttaattcggtcagcgagatttctaaatatacatataccagataaattaaaaattgttggaccgaatgggagcatagagtgtgaatggagaggttcatcactaccgacaatagaaagctatgtcagagataatggaaaagtagcttttcaacaattaaaaggaaaaataaaaaagtaaaaggtgcgttttatacgcacctttttataatgtaattgcggcaataaagccaaatataagtaacggtatattgtaatgtagaaaagtgggtacacatgtatcccatatatgatggtgctgaccatcagcatttaaaccggatgttggtccaagtgtactatccgatgctggagatcctgcgtcacctagcgctccggctgtaccgataattgcaattgtggccattggactaaatccaagctgaatgcaaagaggtacaaaaatggttgttaagatagggatggttgaaaaggatgaaccaattcccatcgtaacgagaagtccaataacgagcataagaaatgcagcgagtggtttgttatttccgattatatgtgcactcgtttgcactagagattcaacatgtcctgtttttcgaagaacagcgccgaatccggcggcagcaatcataacaaagccaataaaggacatcatacgcattccgcttgttaatatcgcatctgcttctttaagtggtagactgccactaactgataagacgataatacctgctaaagcaccaaaaatcattgattctgttgttaattgaacagttaatgtagcaatgatagataataacccgaaagtaatgctacgttttgtatagggaacgatttcattttcggtagtatgaatttgttctgtttcatacgtacgaggttttcggtacgtaatgaataccgctacacataatccaataatcataccgattgctggaatagtcattgcttttggaataagtgcgacatcaaatgtaagaccgctttgcgcagcgttggtttgcaatacgtcatgataaatttttccgaaccctgcagggatccacatataaggagtaatcaatccaaatgtaataatacatgtgacaagtctgcgatccactttcagctcagttaatacttttaaaagtgctggaattaagatggggatgaaagcaatgtgaacaggaatcacattttgtgagaaacaagccatcattaaaataatgaataaaataagtaccttagaataaacttgttttttcgtgtcttgttcattgccaatccattttaatgcagtttgaatcatagcatctggaagtcctgttttggaaagggaaatagcgaaaccaccaagcattgcataacttaaagcgattggagcactgtttccaagaccagttgtaaaagtgttaatcgtttctgaaataccgagtccgccgataagtccgcctgttaaagctccaacaatgatggcgacaatgacctggacacgtaacaaactaagcaatagcataattgctactgcgacgagtacagcgttcataataaatgtaatctccctaaatttttattctgttaagacaagtacatatgaaacattttgctatgtttatacatacttgcgacatattattataaaatgttttctatgaaatgtaaaagagccttttgtgactaatgctgaaaagctagctcttgtttaattgattgcaaagaattggcgaataattctggttcttctagatcaggagaatgtgctgagtttgggaaccaaatcatcttttttataggcgcttcaataatatcgcaatattcctgaacgagtgcataaggggtttgataatcatagcgaccagaacaaaaataaactggaatagataaacttgagatagaagaaaagaaatcgattgtcagcatttcttcccataaaacgccagattttaaatttcctgcgagaaacttgaaccaatctaatagcgtgtactcaggagaaaagaaaccttttcgtatgaaagaaaaggaagatccattttggattgcgcctccgaatgtgccaagccactttctttgaataatgagacgtctcgtatctaaaaatggtggctttcctaattttaaaagggaagctaatgcttttttatgattatgtttttttgcagaacgaattaaatgttgatatagcaattcttcattttgtttcatatgtacaatttgcccaataccgatgtaagcctcaatatactttggatattgatgtgctatgttaagcccaatgatacttccccaagaatgaccagcgagaaatagtttttgtttgttgaaccttttaagtacatattgaatcacttcttttgcatcggaaacgaattgttcgattgtgaaatttgctccgaaatcttttattgaaaaggatttaccagccccgcgctgatcccaattaataacaataaattgcttctctaattctttttgaaaatggcgaataaatccgatttgtgccatcccaggtccgccgtgacagcataataaaataggttgctctacgttttgtccacgcataaggagagtttgttttcgattattaatcataacgctttctatcgtagcgatactgttaggaatgagttgtttgttttcattatagaactgaggggtgtagctacgaaaaagcatattgaaaacctccttttgtgaaatcgtatgaatcgcacaggctattcattttgcatatactgttagaaaatcattgtaacataccatactagtgtcatttcaacacgggaggagggaaattgtgacgattggagaaattatagatggtttaaatagacgtgaacccatcgctattatagcaaaacgtcttgaaataagcccgtatacattatcgaagaaattaagattgattggatacgaatatgatggagagcagaagaaacgtatttttgtaggagatggagaagaaccacgtcacttacaactccaagaagcgaccgcccttcaatatgagaaaacagattatcaattgttaatttatgagcaattacaaagcatttatgaattattaagaaaaagagaagaagtaattgtaccaattatgagtaaaagtgcagagaagaagagacgaaccttttctattaatacagaaatattatcacaattggaccttatatcagaatcgaaaggaattcaaaaatctaaacttgtagaagaggcgttgcaccaatttttacagcaatatgaagttgacaaaacatcacattttgataactaaagaaaaggatactatgttcattggaagaacgagtatcctttttatgatgtatattacgtataaaatagaggatcagtataaatcctttatggcgtgaaaaatgaaatttattattagagaaacacttaatttactttttgaattcttccatcaataactggctgaattggttcttttaattgttttacgtaatcgactaacgcttcaaagtcgtttggaccagtttctgcatttttaccatttttaaatgatacgaatccgtcaccgccagaagctaagaaggcatttgcaactacgctatacattttagatggagataattcttctccgtttgttaaacgtatatttgtaactttttcaccgtttggtttatttgcatcccacgtatattgaatacctgaaatttgaagcattcttgttgttcctttttgccattgctgatttaaaatatcgcgaatgtcttgacctgttaaatctactttaattaattgatttccaaaaggttgaatgccgtataactcaccccacgtaatatcaccagcatctaagtcattacgaatgccaccaggattcatgagggcgatttgagtttgcatcgtttgacgctgagcatcggcaactaaatttccaagagtggactcaccagcatcattttgtttacggtcgataggtgctgtagattttccgactacttcatttacaagtggtgcaattttttctttatattgatctagttttttctttacttgtttatcaggttctacaccttcatgatagggtgtaacaacttcagcttttttctttacaatatcctttgttttacgatcaattgttacatccacgtctgagaaagccgttccgtatgaatttgcttggacaattagtttattatttactgtaccatttacatacgtatgactatgtccaccgaaaataacatcaacttctgggtctgtttcatttgcaattcgagtaagatcgccatttgttaccccagactcatcggttgttccaccgacatgagcaagaacgacgatagatttaacgccgagacgttttaattgttgtgttgatttattaattgcttctacttcatcagtaatttgtacattgttaagcatcgtaggcataacgacatttggtgtatcagttgtaacaaccccaatgaatcctacaggaacaccatctaccatttttacagtaaacggtggtaaaaataagcggccagttgatttgttgtagaagttagcagctacataggggaagttagcccctttgaaattccctgttttttcatgatatccaccgtaaatgaggcgttgcatttcatcaataccttcatcaaattcatggtttccgattgtaccgacatcaaattttaagtcatttaaaaattcaattgtcggttcatcttgtaataatgctgaaactggtggactagctccgacgatatcaccagcatgtacgagaagtgtattagggttttgttttttacgttcttttaaataagtagctaagtaatcagcgccaccagcttctttattattgatttttttaacagtatctagttgtccatggaaatcattaataccaagcatttgtacgtctatgtagcggttttgttcagctggattctgagatgggggagcggcaaatacgcttgaaaaagtaatggtgcttaaaacagcaacggcaggaataatttttttccacataatataattctcctttttttataatctgacatcatacgacataattttaatagattcataggattatagctacataaaaatttagtcttttcgaaaaattaacatatttacaaaaagtgaataatagagtgaagacctttttttattgtcgatttcatcgtgtatctactataatggagaaaaaagtaaaaggtgagtagcatgaagaaaaagaaacaaagacaaatacaaagacaatcacaagtgaatcaaccgaagaaagaaacacttacattaggcgatcaattaaatgattcactcatgcaacaattaaagagtaagaagaaagagttgcaagtgagggaagaggaaaaagaggcagctgaactggaaagaaagcgccaagaacaaaaagaacgtgaaaagaataaatcatttgaagaactgctaagtgaaagtaaccttacttggaaagactttaaataataaaaaatgatcagtggtatttcactgatcattttttgacgagcttgtaagaaaaggggagttagaatgagaaaaattatcgttgttccacatgaaaaccattggagtgaaaaatttcaaatggaggctgaaagattaaaaacagcgatgccagaaacggtgaaaattcatcatattggaagtacgtcagtgcccggactggcagctaaacctattattgatatgatcatggaagtagaaaatatcgaaagagtagatgggtggaatgaacgatttatagagcttggttacatcgtaaaaggggaaaatggtatttcaagacgccgatattttattcatggaactgaagaaaaacgttcgtatcatttacacgtgtttgaaaaaggaaatccagagattgtaaggcatttagcgtttcgtgattatatgatggctcattgtgaagaagcagaggcatatgcaaccttaaagagagaattagccgaaaagtatacatatgatggcacgttatatacggaagggaaaaatgagtttgtgcgcaatgtggatgaaaaagcgaaagaatggagagaaaataacttaaatgaatgagttcacgttattttttagctatataaaagtgttatgtaaactgtacgtatgttttgacttttgggatgaatcttgttgaaataaagttgtggcttataaaaaatgtaacaatgaaagggagacgactgtgcatattccaacaactacacttcataatggcgtgaaaatgccgatgattggtctaggcgtatataaagcgaaagaaggagacgaagtaaagcaagcagtaaaaacagcgttagaagttggataccgttcgattgatacagcaactgtatatgaaaatgaaagcggtgtcggagaggcgatacgtgaatcaggaattccaagagaagatatatttataacaacaaaagtatggaacgacgatcaaggatatgaggagacactcgaggcgtttgaaaagagtttgaaaaaattacaaatggactatgtagatttatatttaatacattggccggtaagagggaagtatgttgatacgtaccgagctttggagaaattgtatgaagaaggtaaagtgcgcgcgattggtgtttctaattttcataaacatcatttagaactattattaccaaattgcaaagtgaagccgatggtaaaccaagtggaacttcatccgatgttgacgcaatttgagttgcgcaattattgtcaagatgagcaaattcaaatggaagcatggagtccgttaatgaggggcggagaagtattccagcatccaatcattcaggctattgctaacaaatatgaaaaaacacctgcacaagttatattaaggtgggatattcaaatcggaattgttacaattcctaaatctgttacaccatctcgtattgaagaaaactttactatttttgattttgcactaactgaagaagagatacgtcaaattaacacgttgaatcgtgatttacatgtaggaacgaatcctgataaatatgatacgttataaaaaagactgtctcctaatactggagacagtcttctgtttatcggtaattcgatatttttaacgatgcaaagcatatgtgtcatatttaacaatcttttgaagttgtatatattcttctttcgttaaaggtaactgttggctagctcgtatattttcctgtaattgttgaagcgagcttgcaccaggtataacagctgcaacagtcttattatgtaagcaatattgaatagctgttcctgttaaagagcgttctccaatcgtttcttttacactcgctagagttgtatgtaattcatcgtaagaataagagagataatccttttcctttactctttctatttttattgcattgttgtcagttaaaattccttttgcaagtggcccgcgggcaatgacgctaatttggtgttcattcagaaggggaaaccattcttctggacgacgatttaaaaggctatattccattagtacactaacgatgtttgagcgttttgcatactcacgaacgacatttgggcgtatagaagaaataccataatggcgaataataccttcctttttcaattcttcaaaagcttcaattgtttcatctattggatcttcaatcgttcccccatgaagttggtaaagatcaatataatcagtttgaagtctacgtaaactttcctttacttcagtttttatgtaagctttagaaggatcccaagaccagccatttttttcttctgtccaacgatttccaactttcgttgtaagaacaatttggtctcttcttcccttcaaggcttttccaacaaattcttcatttaatccgtaatcatataaatctgctgtatcaaaaaaattaattcctaaatcgattgcttcatcgataatatgcatagcttctgtttcagatgtaccgagagacatacagccaaggcccatttctgtaacaaacaaatctgagtttcctaattgacgttttttcataggtcaacctccttacctttattgtacgagagggaaaagaggttgacaaacgtttacttttcgtttcgcattaactgcccgtaaaagcatgattaatgtttcactttatttgctgtaatccactcttgtacagttgcatactctttgctatattgctttagcttatggcgaatttgccatgcttttccgactaaagtgacgcgatttggtaaaatataaactttcatttctatcacgctcctttcaatgtggtaaaatgtatgaggaaagaataggaaatagaacagggagatgaagtagtatgagtaatcttgcagagagaacagtaaaaactgagccgatttttgatggtagagttataaaagttcgtgttgatgatgtagtattaccaaatggagcaatgagtaaacgtgaaattgtaaatcaccctggtgcagttgctattattgctattactgatgaggggaaaattgtgcttgttgagcagtatcgtaaagcgcttgaaaaggcgattatagaaattccggctggtaagttagaacctggtgaaaaacctgaggtaacagcagttcgtgaattagaagaggaaacaggatatgtatgtgaaaatatggagctcattacttctttctatacatctccaggattcgcagatgaaattttatatgtatataaagcgacaggtttgacaaaaaaagaaaataaagctgagttagatgaagatgagtttgtggaattaatggaagtatcgttagaagaagcgattactcttatgaaagatcttcgtattcatgatgcgaagacgatgtttgcagtacaatatttacaactacaaaaataaacactcgccaaaggcgagtgttttttaattgatttttgcatatacacgtgcatcacgtaagctaccatctggtgctaggaaatcattttccattgtaccttctagaatgaattctagacgttctgctaagctacatgcatttatatttgttgcatcagtacgaatttcaattcttctagcgcctagtttatcaaaggcgaactgaattgcacctttaacagcttcggtcatatagccttgttttgtataggcactatgtagccagaagtgaagtgaaaactttggaatatcccagttttcaggctgtagtgtaattgctccgatgaatgtaccagatactttatcgtataagtgaaaatcaagtgtttcacgaagtaaaaactgtccgtgagcttcgcgaacaatttcttcagcactctcttctgtttcagcgttaattggtatccacggtactaagtcttctagagaagcttggattgcttcatatacttctgcaccatcacctggaaatggtttacgaacttgcaagcgttcagtttgaaataatgttggaaaatctaataataatggtttcaagagaaatccctcctattctctactttttagtttagcaaagtagagcggaatttcaatgttaattcgtcatacttttttctttctttcatacatttttaataagagtgtgaacggagggaaggaaaatgtggcgaaaaaattggcaagaccgtgtaatgtctcacatacaggaaaactcttcattatatatatttaacgccgttttattattgatgggagtaatattcggagctattctggtgaatagtttacaaatcaatcaaaaacaagatttatcattttatttacaacgtttttttggacaagtctctaaaggagaatttgccattgcgggcgaaatgtttcgagaaagttacttttcgcaattaaaatacatcggatttatttggattttagggatttcaattattggattaccacttatttttattttattatttgtaaaaggagttgtcgttggatttacagttggttttttagtaagtcagcatggatggaatggattattattagcatttgtatccgttttgccacaaaatttaattatcattccagtctttctcgttatgacaactattgctgcaagtttttctttacggatgattaggcatcaatttattagaaaaataaccgagccactattaccattattaatccgttatacatgcttctttctcgtaattggagtggtgttagcacttgcttctagtgtggaggcttacgcatcaccagttttaatgaaagaagtcgttgaggctattaataaaaaataaatactttttgagaataattatcaatttgtttttattgtttttttcttttgacagaagcccttcttctgatataatggtgtaagagtggcgaggagggagtagtaccgaatggaagaaagaattgaacgaattaagaagcaattacatgcagcgagctacaaattaacaccgcaacgtgaagcaacagttcgtgtgctgctagaaaatgaagaagatcatttaagcgcagaagatgtttacctccttgtaaaagaaaagtcgccagagatcggattagcaaccgtctatcgaactttagaactattatctgagttaaaagttgtcgataagattaacttcggagacggtgtttcacgctatgacttacgccaagaaggtgcgcagcgtttccaccatcatttgatttgtacacaatgtggtgctgtacaagaaatacaagaagatttacttggtgaagtggaaaggaaagtagaacgagactggagctttaaggtgaaagatcatcgtttaacattccatgggatttgtaaaaattgtcaagaaaatgaaacggatgaaaaataaccttttcctatttatctaggaagaggttttttatttgaataaggtataaattggtgaaagcttggcatatgttgtaataacttatattttggaggaatttacaatgcgccgagctttaaaattaacttttgatggaataaaagtatttttattatttacaagttgtacgattttgttttatttcgctatactatggataaatgaagaatatgaaagctatcatcgttatgaaaaacctaaagaagagactgtagaaaaagtatcagggaatgaagaaccggcaaaggatgctttcgtaaatagaatgatgtttttctatgaaaatggggagtagtgtagagtggaagatcaattaaaagattttattcattatatggttgtcgaaaaaggattagcaaagaatacagtagtatcttatgaacgggatttaaaaagctacgtaaagtatttgcaaaatgtggaacagacgaaaacttttcatgaagtgacccgtttacacattgttaattttttgcagtatttaaaagagaacggaaaatcttcgaaaacattggcgcgtcatatcgcatcaattcgttcgttccaccaatttttacttcgtgaacgagcggtagaacacgacccatccgtacatattgaaacgccacaaggggaacggaaattaccaaaagtattatcagttgatgaagtagaggcgttacttcaaacaccaaaaatgacaagtgcttttgggattcgtgataaggcgatgctagagttactgtatgcgacaggacttcgtgtttcagaattgattgcactcaatttagaagatgtacatttaacgatgggatttgttcgttgcatagggaaagggaataaagaaagaattattccactaggaagtttagcaacggaagcgattcaaaagtatattgaaaaaggaagaagagaattaatggggaaaaaagtagtagatgcactctttttaaaccatcatggtaatcgtttatcaagacaaggattttggaaaatattaaaacgattagcgaaagaagcaaatattgaaaaagagcttacacctcatacgttgcgtcactcgtttgctacgcacttattagaaaatggagcagatttacgtgctgtacaagaaatgcttggacatgcagatatttcaacgactcaaatctatacgcacgtttcaaaaactagattaaaagatgtatataaacagtttcatccgagagcatagttactatgctctttttttcatagattaagaggggaagaccgcttcacagaaacttcacaaacatttcgtatattgttttcagcagaagactggaatattacaatgtatttcctctatactaaatagagtataaaggaggaaatgatgatgaaaaaactgattataactttatttatcgcgatgctagcgttggctggctgtaatacaaacaaagaagaaccgaaaaaagaaaagaaacttgaaagtgtaaacgtagcaattcaaacgaatccgaaagaaattaaacctggtgaaaaaacagaagtacaagcacttgttacacaaggaaaagaaagagtaaccgatgccgatgatgtaaagtttgaaatttggaaagatggcgacgagaagcacgagatgttagatggtaagcataaaggaaaaggtgtttatgcagtagagaaaacatttgaaactgacggagtatatcatattattcctcatacaaatgcacgtgatatgcacgttatgccagaacataaagttgctgtaggaaatgcgaaagtagaagatgcaaaaaaagaaaatagtgaccacagtgcaggacatggagatcataaaagtgacacaatgatccatcttatggctggagacataaaggcaaatgctgaatctacaatgaaagttcatttaaagcaaaaagaagaagcattaactggtgctgaagtacaactagagatttggaaagatggtgttgaaaaacacgaatttattccagcgaaagaagggaataaaggagagtatgaaacgaaacatactttcaaagagaacggtgcttacaaagtgaaagtacatgtaagaaaaggcgaattgcatgaacataaagaagaaacaatagaagtaaaataaaaagtagctctttagagctactttttatttttaatatgaagaaataaatcataaaaaaattagcacttcgttgcagaatggattacaatagaagtgtgaagaaaatgagaaattctacgaaaatgtattaaaaagaaagcgtaaacatgttatgatatcagtatcagatgtctgacatctgacttagaaaaaactagaaatgtttttgaatcgtttcaagtaaacgaaataggttagaaaatgatttaaagaagtactgtttgacaatgagaattctttttgataacagtttcactttatagcgttttgaacatactacaagaagtagaactgaacttataggagggcgcagttatgaataaatataaacgtatattcctagtcgtaatggactctgtgggaatcggtgaagcaccagatgctgagcaatttggtgatttaggatctgacacaattggtcacattgctgaacatatgaatgggttacaaatgcctaacatggtgaaattaggtcttggtaacattcgagaaatgaaaggtatctctaaagtagagaaaccacttggatattacacaaaaatgcaagagaaatctactggtaaagatacaatgacaggtcactgggaaatcatgggcctttacattgatacaccattccaagtgttcccggaaggattcccgaaagaattacttgatgaattagaagaaaaaacaggccgtaaaattatcggtaataagccagcttctggaactgagattcttgatgaacttggtcaagagcaaatggaaacaggctctttaatcgtttatacttctgctgatagcgtattgcaaattgcagcacacgaagaagtagtgccacttgatgagttatataaaatctgtaaaattgcacgtgaattaacattagatgagaaatacatggtaggtcgtgttattgctcgtccattcgttggtgaacctggaaactttacacgtacaccaaaccgtcatgactatgcattaaaaccattcggccgtacagtaatgaatgaattaaaagatagtgactacgatgtaattgctatcggtaaaatctctgatatttatgatggtgaaggggtaactgaatcacttcgtacgaagtctaacatggatggaatggataagcttgtagatacattaaatatggactttacaggtcttagcttcttaaacttagttgactttgatgcattattcggccatcgccgtgatccacaaggatacggagaagctctgcaagaatatgatgcacgtcttccagaagtattcgcaaaactaaaagaagatgatctattattaattacagcagaccacggtaatgatccaattcaccctggtactgaccatacacgtgaatatgtaccattattggcatatagcccaagcatgaaagaaggcggacaagaattaccacttcgtcaaacatttgctgatattggtgcaacagtagcagaaaacttcggtgtgaaaatgccagaatacggaacaagcttcttaaacgagctaaagaaatagggggataaacaaatgaatcgtgaacttattacaaaatcagcttcatacttaaaagagaaatttcaagagacaccacaagtaggactaatccttggatcaggactaggtgtattagcagacgaaattgagaacgcagtaacagtaccttacagtgaaatccctgaattcccagtatcaactgtagaaggccatgcaggtcaactagtatttggtacacttcaaggtgtaacagtagtagcaatgcaaggacgtttccacttctatgaaggatacgacatgcaaaaagtaacattcccagttcgtgttatgaaagaactaggtgtagaaacagttgttgtaacaaacgcagctggtggtgtaaatacatcatttgagccaggcgatcttatgttaatttcagaccacattaacttcatgggtacgaatccattaatcggaccaaatgattctgaaatgggcgtacgtttccctgatatgtctacgtcatatacggtagaacttcgcgaaatggcgaaacaagttgcagcagacttaaatattaaagtacaagaaggtgtatacgtaggaatgacaggtcctgtatatgaaacacctgctgaaattcgtatgcttcgtacacttggcggagatgcagttggtatgtcaacagtacctgaagtaattgtagcgcgtcatgctggtatgaaagtgttaggtatttcttgtatttcaaatatggcagctggtattttagatcaaccacttcaccacgatgaagtaattgaaacgacagaacgtgttaaagctaacttcttagcattagtaaaagcaatcgtaaaacaaatgaaggggtgacttcacaatgagaatggtggacctaattgcaaaaaaacgtgacggacatgcattaacgacagaagaaattaactttattgttgaaggatatacgaatggtgatattcctgattatcaagtaagttcacttgcaatggcaattttcttccaagatatgaacgatcaagagcgtgccgatttaacgatggcaatggtaaatagcggtgatacaatcgacttatcagctattgaaggtgtaaaagtagataagcattcaacaggtggtgttggtgatacaacgacacttgtattaggtccattagtagccgctttagatgtaccagtagcgaaaatgtctggacgcggtttaggacatactggtggtacaattgataaattagaagcagttccaggattccatgtggaaattgaaaacgatgaattcatgcgtcttgtaaatgaaaacaaaatcgctgttatcggtcaaagtggtaacttaacacctgctgataaaaagctatatgcacttcgtgatgtgacagcaacagtaaactcaattccgcttattgcaagttcgattatgagtaaaaaaattgctgctggtgcagatgcaattgttcttgatgtaaaaactggagcaggtgcatttatgaaaacggatgaagatgcaaaacgtttagcagaagcaatggtacgtatcggtaataacgttggtcgtaacacgatggcagttatttctgatatgagtcaaccactcggtgaagctatcggtaacgcattagaagttcaagaagcaattgatacattacaaggtaaagggccgaaagatttagaagagctatgtttaacacttggaagtcaaatggtgtaccttgctggacaagcttcatctttagaagatgcacgtgaaaagctaattgaagtaatgaacaacggaaaagcgctagaatcatttaaaacgttcttatcagcgcaaggcggcgacgcatctgttgttgatgacccttctaaattgccacaagcacaatttaaaattgaagtggaagcgaaagaagacggatatgtatcagaaatcgttgcagacgaaatcggaacagcagcaatgcttttaggagcaggacgtgcaacgaaagagtctgaaattgatttagcagttggtctaatgctgcgcaaaaaagtaggcgatagagtgcagcaaggtgaatctctcgttacaatttacgcaaaccgcgaaaatgttgaagatgtaaaagcgaaaatttatgagaacatgaagatctctaaagaacacgtagatgcaccaactttagtacacggtatcgtaacgaagtaataaaaaaaagctgaggagatttctccttggctttttttactattttttgtttataataataatgggtgaaattatgattagaatttgtgcagtaacaaaaacagatgaagtattatatgatgtttctctagaagaaacaaagaaagaccatattgtatggtattggctagatttatataagccaacgaaagaagagtatacatatattctgcaagaccattttaagttccatccccttgcaattgaagactgtatagaatatgtacagaggccaaaagttgatttttatgatggatataactttttagtacttcacgcatttggggaagatggactagaaccgcacgaaatcgatttatttattagtgatcgttatattgtttctttccacttttctcataacaatgcaatcgaaagagtatggaaaacacttggagaaaagaagcgtattaaaaatagtcctttacacgtagctcatacaattatcgaccaaattgtagatgactattttgcgcctgtatattacattgaggatcatttaaatgcaattgatgataatttaacgggggagacagcaggaagtgtattagaagaggtatttgatatacgtacagatttatcaaagctaaggcgtacaatcattccgatgcgtgatttattatatcgtattttaaattcgactcgtttttacggtataagcgatcatgaaatttactttaaagatatacatgatcatttgcttaaactaacagaaatgattgaggcaagccgagagttaacagcagatattcgggatagttatttttcattaaactcacatcatatgaataacattatgaaaacattaactgtattctcgactattttcatgccattaacatttattgcgggagtatatggaatgaactttacgcatatgccagagcttggtggacaatatagttattttatttgtctacttattatggcactaattggcggcggaatgatggcctggttttataaaaaaggatggtttaagtaaaaaaacaccgaggatttcctcggtgttttttttaaccaatagcatgtaatacaaacatagctaaaaataagcatgtaatgatatacatagatggtgcgacttctttacgctttccaagagcaacttttaagatagggtaagcaataaatccgaacgcaatgccatcagcgatactatatgtgagcgggatcataacgataattaagaatgctggaaatccttctgaaaagtcattcagaggaatttgttgaatgcttgtaatcatcagaccgccaataataattaagattggtgcaatggcactatcaggaattaatttgacaaatggaagagcaaacagtgatgcaaagaatagcaacccagtaacgatagacgtcagacctgtcttaccacctgcagtaatacctgcggcactttctactgttgaaacggtaggacttgtgccaaatagaccacatgttattgctgaaattgcattggcttggtaagcacgtgggaatttacgatcatcttctaataaaccgtgcagaagtcccatgttctcaaagataagcaccatgcttaaagagaatgttgcaatccaaaatggtaaggaagaaagtttcccaaatgacatagctccaaacacatcaccgtaattagcgaatgagaatgaactacttcccacttgactcgtatccacaagaccaaatagccaggcgataccagttcctattgcaatcgtccataaaaagtttccacgtacgttacgaataaataatacaagtgcaatgataagagtaagtaatgtcgcaagaacgacaggattacttaatttccccattgccacagcagtatttgggttcgaaacgactaaaccacctttttgcaatccgataaacgctaaaaataatccgatgccgacagtaatcgcttcctttaatgactttggaattgatactgatagcacgcgagcgattggtgtaaaagcggcaattgcaaaaataataccagagataaagacagcagccaatgcttcttgccaagttagtccaagcgtatgcacagctgtgtacgtgaagaatgcatttacacccatacccgggacaagaatagcaggtgcatttgcccaaaatgccatgagtagacatccgacaaatgaactaaaaacagttgctaaaattccagcttcaagaggaatgccagcatctgataagattgacgcatttacaatcataatatatacgattgtgaaaaatgacgtaactccagctaatacttcttgttttggtgatgtttcgtgtaaacctaatttaaatgttctttcaagtattcctttcatgttaaaccttctttttcatatccctctcccacccgtgatatctcttatgtaagagctcaccgttctttattatatcagaacatcatgtttttacaacaagtaaaatgataacgtttacttgtaaagagaattcgttataaatacgtaaaaatagcccgtatggatgaaatgatttctaattcacccgattgaatgggaggggctgcttgcgcatgtaaagtagcataagacgtaacctcccgtggtaattgggcagattcttcaacgaatgagaggggaacaggattaatatttaaattatatgtactcgcaatagcacgagctttttctactgcttggtgcagagcttgaatgagagcttgctcataatatttatttggatgagatactcggaaacgtaaaccttttgctacatttgcgccatttgaaacggctatatcatatacttccccagctttttgtacatttaaaacggtaatttcatacaaatgctccacgcggtatccttgtagcaatgctttatcatttacatattcgtattgaggagtaattgtataagaaatcgtttctatatctttatcggcaataccaagctgtttaagtgcatccagcaattgtttggattgcactgcattttcttcttgagcctgttttacatttttatcatctgttcgaatgccaagcgttaatataacaacattcggttttgctttgacaacgccttcgccttgtacagtaatagtagcttctttaccagtattagctgtgcgtacgttgtgtaaataaggattcattccaccctgcattttccatcaccatcctttttatatgtatatgtgtgaacaaaaaagaaatttatatgaaaaaagttacataaatgagaatgttgaggaaagaaagcatgtacaacataggtatttatagattataatatgtgtaaatatgataaaaaagggacgaggctattgaacgaaaaaagagaaacgctgattttagatttatctgcatcatttcgaaaaatgatacgtttattacaaaatgatattaatacacgttttgcagaacatatgccatataatgaattttctgtattacgtgcgttatttttaaagagtccacagatggcttcgcaaattgcgagtgaagtaaacgtaacctccagtcatattacagctgttacagatcgtctcgtacgaaaaggattagtagaaagaaaacgttctaattcagatcgtcgaatcgtgtatttagaaattacagagcacggaagagaagtaactgaaaaacttgaagctgtgcgtaaagaatattataaagagagatttaaaggttggagcgaccaagaaatagaaatggtcttagaactatttggccgcgtattataataaatgaggataggaagcgaaagcattcctatcctttttcttttgaataaaaatattttgaaactccgatactttaattaaaagatcggaggaaagattatgaaatatattgctgcacttaccattttatttggtggttttttctattttcaaacatttacgtacgcagatacgcctatccaagtggtacgaaaagaagtgaagtacattgaaaccgataatacagtcttatattcgaaattatgggttcgttctatgcaaaacgcagtattattccaccatagcgataatattcgtaatcaggacacattacgtaatgtaacaagttcatcgcttgttaaagcgaaacaactattttttcagaaagcagcactctatataccgagactatcgcaatacgtatcaaaaataggaaaagaaaatattcaagtgtactacattgcgattcactataatgtgaaaaaagaaaatgcatatcaattagatggcatgaactattttctacaagtatttgtgaaagagcgtggggaatggaaaattgctgaaagtgtagttgcaccgacagagcaaattgtgcaaaatggtgatggatttgggatgaaagaagagatggtgtatggggataggagagagaatgtgaaataacctctttatttagatcgggatatataataaaaaagcattgctcttgtgcaatgccttttttatttggttcatataagagttaaataattcataacatatttcttttgtcattatataccttttttgtcagcttctatttaatgtcattgttccgtgtttatagtttcacatctatgatgcttttggaaacatgtatccaccaccttaatgcatatttatttccctacaaaagcaaacttcaattttaatagacgtgtaaaaatgaagtaacttatggtagcgaataggaaaaatccaacataataagacagaagtgcatctcgtccgcctaatattctaccaccaagtagtccgaagcatagaacagtgcaaattatgaaccatttttgcaagttaggaaacaatagtatttttccactttgttcgtttggtgtacgtgtgtatagaaaggttgctattgataaaaaggtaatgatgtaagcaaatggtgttaatagtgtccaaggagaaggtacagaaatacgctccgtaggattgtcctgtggtacactagaaagtttattgccatagtcatcaaatgtttctatcgggtggtaatcataagtaatagaaaaatattctaatggtgaaatgatacctatatgttgtaagtactcatgagtatggtgctctatttctcccattgcatctacagaccattgtgtgtgtgaataaatgaatccggaaattaacaatccaaaaccgtatggtaaaaataatagaatgatagttaaaatactttgagaaaatatatgtccagtaagagtcccgataaataaggcgaatgtataaatagcgataagtacaaccgtagcatatagaaagtaactatagaacggagcaaaggtttgatactcattgtgaaacgacatgttctttattccgtacatgctaatccagcaaacaatttgtactgtaataatattcaaaacaccaagccaccattttgttaaaaaaatatcctttcgtttaaaaggcatcgagaatagaaaatcagttgattgattattacgttcccatccaattaaaagacaagcgagtgcaattagagtagctccttgaaagaagacggcaccatcagatgtctgaaaatagtaggagtagtaatatgcatagtcaccaaacttcatttttgatagttttagttgcatttgcgcttcttgataatatttataaggtagttgatataaactagttaaccaaaataatagaattatatattttccttgcttccattgcctcatccataaagctttatgaaacatgtgaatcctcctcaaatgtagtgataaaaatatcttcaagtgacattgttaattcttcaataagtataggttgctctttgtaaaacttctcgagtgttgtagccacatttccctcaattaagattgtatatacttttcctgtttggtttaatattttaatattgcttaagttttctagcttttgaggtaatgaacgttcgtaagctacttgtatttttgcaaatcgtgattttgcatcgtctagtgatgtaatagacgagatagtatggccttttaatataataattgtatctgcaatttgttctacttcatctaaatggtgagtggagatgaaaatggtaatctctttttctgcaacttctccaacgagaaactgtaaaattttccttttcacgataggatcaagtccatttgtcggttcatctaaaatgatatattctgcctttgtagaaacagctaaaatgatggcgagcagtgctttcatgccttttgaatagctacgaattcgtttgtttggtaagttaaaacgttctaacagttcatagaaatgtgtttcatcaaatgcggtataaacttctttataaaactttacgatttcttttatcgtatagccgttcagtatattagtagaatcaggaacatatacaattttttgctttatttcaggaaactgatgaatgtttgtatcttcatatgtaacagttccctcgtctgggtctaaaataccgaccatcgttcgcaataaagttgttttccccgcaccgtttcttccgagtaatccgatgatactccctctttgcaatgtgaaagaaacattgtctaaaattgtttgactatcaattgttttcttcaagtttgtcactttcaacatccgtattccctccaatctctttatagtatgaatctatccaatcatgaattttatctttcgtaataccaagataagaggcttctaatagtaattgatgaaattgcttttcaaccatagcgattttcctttcgtctaatgttggggtaatcgattgggatacaaatgttccttttcctcgtaacgtttcaataattccttgtcgctctaactcttgatacgctttactcactgtatttggatttataacgagtaaagaagcgagttcgcgtacagaaggaagtttatcacttggagccaacatgtttttcaatacgagttcttttatattttgaacaatttgttcccatatcggagtgttgcttcttgggtcaagttgaatatgcaagagcaatgtctccttcctcatatgtattaagtgtactactgtgagtaatacacttaatacaatataggggacgaatgtatttgtcaactgaaaatgttagaaaaatttggtattaaaaaaaggtaaattggaaaaaataggtctgatatagaatggagggttagtcatgaagcgagtttttggaatacttgtttgtttcatgttattgctttctggaacttcagtgagtttcgcacaatctgagaaaacgaagcaggagaaaacagaagaaacaacaccgaagttagcggaacaagcgtcgtcagcaatcgtaattgagcaagatacaggtaaagttttatttgataaaaacccaaatgaaaaattaccacctgctagtatgacaaagattatgacaatgcttttaattatggaacaagttgaaaaaggaaaactaaaactgaccgataaagttagagcgagcgaacatgcagcttcaatgggtggatcgcaaatctttttagaacctggggaagagatgactgtaaatgagatgttaaagggtattgcaattgcatctggaaatgacgcatctgttgcagtagccgagcatatcgcaggttcagaagaaggatttgtaaatatgatgaacaaaaaggcgaaagatctagggctgaaaaatacacattttcaaaacccaacaggtcttccggccaaagaccattattcgacagcaaatgatatggctataatggcgagagaattgatgaagtatccacttattcgtaaatacacaggtaagtacgaagattatttacgtgaagatacggataaaaagttttggctcgttaatacgaataagctagtacgtttttatcctggcgtagatggagtaaaaacaggttttacgacagaagcgaaatattgtttaacagcatcggctgaaaaaaatggcatgcgtatcatttcagttgtcatgggagcaccaacatcaaaagaacggaacaaccaagtgacgaagcttcttgactacgcatttggtcaatatatgacaaagaaattgtatacgcgcggcgaaaaaattaagacagttcaagtagggaaagggaaaaaagaaaaagtagatttagttgcatcagataatgtttctcttcttatgaagaagggcgagaatatggacaaggtaaaacaagaagtaattgctgaaaagaaagtaaaagcaccgattaaaaaaggtgacgcgcttggtacacttgttattaaaaaagataaagatgttttattaaaacaaacaattgtagcaaaagaagatgttgctgcagcgagctggtgggagttatttaaaagaagttttgggatgttttcaacatcaaaatagcggcaaatattttgccgcttttctattcgtatgtaagtgaataatgctgaaaggtttcactttatgacgaaatagttcttcttttgtcagcaggaaggattcttattttgtatcacgaaaatctttatgtatgtgaataagtaaagtttgagcataaggaggaaatcgtgtgagtctttccatgcaattagaagtaaaacgtgacgtcctatgtgtgagactagagggtgaattagatcatcatacggctgaagagttgcgaacgaaagtaacagatatgattgagacacatggtgttcatcatattgttttgagcctagagaacttatcttttatggatagttctggtctaggtgttatattaggccgatataaacacgtaaagggattaggtggagaaatggttgtttgtgcaatttcaccgcctgttaagcgtttatttgaaatgtcgggcttattcaaaatcgttcgcttagaagaaagtgaagcgcacgcgctcgcgacgttgggggtggcatagatgagaaatgaaatgaaccttcaattttcagcattaagtcaaaatgaatcgttcgctcgcgttacagtagcggctttcattgcacaactagatccaacgatggaagaattaacggagattaaaacagttgtgtcagaagcggttacaaatgcaattattcatggatacgaaggaaatgcagaaggtattgtttatatttctgtaattttggaagaagcaatggtgaaactcacgattcgagatgaagggattggaatctttaacttagatgaagcgagacaacccctttttacaactaaacctgaattagagcgttccggaatgggatttactatcatggaaaattttatggatgaagtagaagttatttcaaacgaatctttcgggacaacaatccatttgacaaaatacttatcaaatagtaacgctctatgcaattaaggagaatagcctatggacatagaggtcaaaaatgagaagaagaaacctcagttaaaggaccacgagctaaaagcgttaattcaaaaaagtcaagatggagatcaacaagcgagagatacaatcgttcaaagtaatatgcgcctcgtttggtcggttgtacagcggtttcttaatcgaggatacgaaccagacgacctatttcaaattggatgtattgggctcttgaaatcggtagataaatttgatttatctttcgacgtgaaattttcaacatatgcagttccaatgattattggtgaaatacaacgtttcttacgtgatgatggatcagtgaaagttagtaggtctttaaaagaaacaggaaacaaaattcgaaagatgagagatgagctttcgaaagaattcggaagggctccaacgattaatgaagtggcagaggcactagaactaacgccagaggaagttgttctagcacaagaagcgagccgggccccttcgtctatacatgaaactgtatatgaaaacgatggagatccaatcactattttagatcaaattgcagatcaatctgaaacgaaatggttcgataaaattgctttaaaagaagcgattagagaactagatgaacgagagcgcttaattgtatacttgcgttactataaagatcaaacacagtcagaagtagcagagcgcataggcatttcgcaagtacaagtttcaagacttgaaaagaaaatattaaaacagatgaaagatcgaatagacgaataattgtctattcgatttttttatgccgttaataggagagagatgttaatttttgcaaaaattaacagaatttattgataatttagtcaatttaaaatataatccaagtatgaacttgtcataaagggggaaggaaacatggaaacgaggcaacaatggggaacgagagctggatttatttttgcagcggtcggatctgccgttggattaggaaacatatggcgttttccttatacagcgtatgaaaatggaggaggagcattctttttaccgtacttatttgcattattaacgactggtatttcattgttagcgtttgagtttgcccttggtcatcgtcatcgtggttcagcaccacttacatttttccgtattagcccgcgtgccgaatttattggatgatggcaaatgtgcgtaacatttatcgtttcaacatattatgcagtgattattgcttggtctatatcgtatacatactttgcaattactggagcatggggaaaagacacgcaatcatttttatttaaagagtacttacatgttgcagataagccagggcaatttggaggacttgtaccggaagtattaattccattagttctcgtttggattattgtgcttggcgttgcatttaaaggagttaaaaaaggaatcgaagttgttaaccgtatatttattcctttattagttgttatgttccttattatcgtcgttcgtgcagtgacgatggaaggtgctatgcaaggactagatgcattctttaaaccagattggagtcgtatttttgatgggaaagtatggcttgctgcttatggtcaaatattctttagtttatctttagcatttggaattatgattacgtattctagttatttaccgaaaaactcggatacaacaaataatgcctttattactggatttgccaactcaggatttgaattattagcaggtattggggtctttgcagctcttggatttatggcgaataatatgggagtaccggttgataaagtagcaagtgctggcgttgggcttgcgttcgtagtatttccgcaaattattaatgaattgccgatgtcaccgttgtttggtgtattatttttcttatcgttaacggttgctggaatcacatcacttatttcactcgcggaagtatgttttgctgctgtgtctgaaaaattcagtttaagtcgggaaaaaaccattggaattatgggaacccttctcgtgttagtttctcttgtatttgcaacacgtggtgggcttatgttcttagatgttgtcgactatttcgctaataatttcggattaattacaattgcacttgcggaagtagtgacgatagggctcattttacgtcgtttaccagtttatcaaaatcatgcaaactttgtatctgatattaaattaggaacgttttggagagtaagtttactcgttattactccgcttatgttagggtatatgctaattgatggtacaatccaaaacattaaaaagaattatggagattatccgactgagtttgttgtaacgtatggttggtcgatagcagcagccttccttatcgttgcgctaattattagtctaaagaaatggaatgcacaaatacattcggattctgccaagcttgaaaaagagtggaaagatcgaggtgtttcataatgagtggatcagcaattatgatgatggttattggaatagtagtcatttggggagggcttgcattaagtattgcaaacttatttaagaaaaaggcataagtaaaaaacatctgtaccgaaatggtgcagatgtttttttatgaaaaaattgtattagaaaaaaattcaataaccatactacaactacgaggaagagtgaaggggtgaatgaaagttggaacaaacgatttatattaaaatgcgcaatcgtttaaaagtttctcctacttatgaagtaaagctgggcgatgttgctcaacttgccggagattcttccgtagttgagttgttacaaaatgagatagtttacaaaataacagcgcatgataagacgcatgttgtaattgatgttatgaaagtaattgagattattcaacagaaagcatctcatctacaaattaatttactcggttctggacaaactcttgttgaaattatatacgaaaaaaagaaggcacacccaatttttttcgggcttgtatggctattacttttcattggagcggcccttgcgatcatttatttccatgaagatgtaagtatgcaacaagtacatcaacggttatattacatgattactggagaatttaatgcgcaaccacttttatttcaaattccttattctttaggtcttggtttagggatggttttattctttaatcatgtatttcaaaagcgaattaatgaagagccaagtccgctagaagttgagatgtttcaataccaacagtcacttgatcagtatgtaatcgttaatgaaaacaaggataatatgaaacaacttaccgatgattgagtatggatttgttattttaattggtttagctggagggattgcggtaggtagcggatatgtcgcatttttagctgtacttggtataatcccccgtttagcccaattaacgagaagtggaaagcatattcaatattttgagtgggcagttattgcaggtactttaacaggggcttggtgcagtttgaaaaacattacatttcaaacgtcgcaatattggctcgttatattagggatattttgtggcacgttcattggaatgcttgctgcggcattaacagaggtgttaaatgttctacctattttagcgaaacgagtaggggtagagggcaagattattgttttactcgttgctattgtacttgggaaagtaataggatcgttgtttcactggatttatttcgtaaagtaggaggcagtatataaatgacaagtcagaaattgaaggatgattacataaataaagtgaaggagtatcatccaaagccaaactatttactaaattgtatcaaagcatttcttgtaggtggactcatttgcacagttggagaagcattgatgaaattttatatacattattttcactttagtgaacaagaggcaggaaacccaactgttgcaactcttgttttattatccgcgattttaacagggtgtggtgtatatgataaaattggtcaatttgctggagcaggatcagcggtaccggtaacaggatttgcaaattctatggcgagcgctgccttagaacataagagcgaaggggttgttctagggattgctacaaatatgtttaaactggcaggaagtgtgattgtatttggggttgttggtgcatatatcattgggttaataaggtatacctttaaaatttttatgtcttaaaggaggggctagtatgaggttgaccggaaaacaaacgtgggtatttcaaaatgatatatatgtaaatgcaacgggcactgctgtcggtccgaaagaagctgagggccctcttgggaaaaaatttgatatttcatatgatgacttgcattgtggagaagaaaattgggagctcgccgaacgaagattaatgtcagactcaattcaacaagcggtgcaaaaagggaatataaaaacatcgcaaattgatttctttttagcgggagatttattaaatcaaacagtgacagcaaattatgttgcgcgtaagtggggcattccttttttaggaatgtttagcgcttgtgcgacgtctatggagactttagcagttggctcagcttttatagacggtggatttgcaaatcgtgtcttagctacagtaagcagtcataatgcaacggctgaaagacaatttcgctatccaacagagtatggtggacaaaaaccagggacagcaaattcaactgtgactggtgcaggatctatattaattagcgatgaaaaaagtgcaattaaaattacgtcagctacaatcggaaaagtgcaagatttaggaatcacaaatcctttggatatgggggcagcgatggctccagcagcagctcatacaattcaacaacattttgaagatttaagaagaagtgccgatgattatgatttgattgttacgggtgatttatcagctgttgggacgccgattgcgaaacaacttttacttgaggaaggttatgatcttgggcatatatacaatgattgtggattgatgatttatgaagcaagtcaagaagaagtgtttgcaggtggtagtggttgcgcttgttcagcagttgttacgtatggtcatttattacacgagatgcaaaaagggaatttacaacgaatttttgtcgttgcgactggtgcattattaagcccaatgatgatgcaacagaaggaaacgattccaacaattgcacatggtgtcgtatttgagagagttaaaggagagtgaattgtggattttatatatgcatttcttgtaggtggagctatttgtttaattgggcaactattgttagatttcgtaaagttaacaccagctcatttaatggcaacttttgtagtcatcggagcaattttagatggatttggattatacgataaactaataaagtttgcaggtgctggagcgacagtccctattacaagttttggacattcactattgcacggagcaatgcatgcagcagaaaaacatggatatttaggaattggtattggcatgtttagtttaacgtctgcgggtatttccgcagcgatattgttttcattttttatagcacttatatgtaaaccgaaaggataaatcaaatgagacgaagggttgttttggtcacagatggagatgaatatgcaaagcggacaattgagcttttaacgaaggaatttgggggaaggtgtatttcagcatcacaaagtaatccaaccaaattgacagggaaaaaagttgttgagcttattatgcaaacgccatatgaccctgtatttgtcatgtttgatgacagtggatttattggagaaggatctggtgaaaaggctttaaaatatgtggctacccataaacaaattgatgtgctcggtattttagcagtagcgtctaatacgcatcattgggaatgggcacgtgtagatgtaagtgtagatcggaacgggaatttaaccgaatacggtgttgataaatttggacttccagatggtgaaattggcaggattagcggagatacaatatattgtttagacgatttaaatgttcctgtcattgttggagttggtgatattggtaaaatgtgcggaaatgatgaatgggagagagggtcacctattacaaagaaagcaattcaattaattttagaaaggagtggattttatgacgaagcctaaaaaagtggatatccctatatcaactttcataagtgacaatgaaaattatttaaaacagacagttggactaggcgttacatacgatgttggcattcgtaaatttcaaattttgaataaagaaattggtgtgttatttgtaaacggactttgtgatacaaattatattatccatattttagaagaagccgtggatacaaatgagataagggatgtagaagaagatacagttaagcttttagagaatcgcttaatccatcaacaagtaagcaaagtgaaaacgatggatgaggtaatgctccaagtattatcaggactcattgtgatatttgtagaaggtgaaacggaagcgttcgcgatcgatgttcgtagttatccagggcgaacaccgacagaaccagataccgaaaaggtagtacgtggtgcgagggatggatttgttgaaaatatcgttgtaaatacagcattaattcgtagaagaattcgagatccacgccttcgaaatgaaatggttcgagtaggagatagatcgcaaacggatatttgtattacatacgtacaagatgttgcaaatgcggatttagtaaagattataaaacaagaattaaataacattgatgtagatggaattacgatggcggataaaacagtggaagaatttgttgtaaagcaaagctataacccattcccgcttattcgatatacagaaagaccagatgtagcagcaaatcacctactagaagggcatgtgttagtactcgtcgacacatcaccaagtgctatgattacaccgacaacatattttcatcatttacagcatgcggaagagtttagacaaaatccagctgtcggtacatttttacgctgggtgcgctttttaggtgttatattttcgttatttttattaccattttggttagtgtttgtatttgatccaactcttttgccagcaaatctggcttttattggaccgactaagatgacgcatttaccaattttattacaagtgttaatggcagaggtcggacttgagtttttaaggatggcagccattcatactccaacgccgttatcgtctgcagcagggttgatttccgctatattaattggtcaaattgcaattgatgtaggtttgtttgtgccagaagtaattttgtatgtagcagtttcgatggttggtgcatatgcaacaccgagttatgaattaggattagggaataaggttgggaaattgtttgttattattttaacaggtctcttccatgagatgggatttgtaattggtatgacgatattaattttatttttaacgtctataaaaagtttacaaacaccttatttatggccgtttttaccatttgattggggcgcgttaacaaaaattttactccgtccaacaatgtctagtttaaaagtacgaccaagtattgtaagacctcaaaatgtaaaaagacaaaaataaacgggattatacacccgtttattttttttagcaaaaatttattattttttaacaaaaatcaaacattttttgtgtacacttagagtagatattgtgtatggaaggggaagaggacatgattaaattatttgtaagtgatttagatgacacgctcgtttacgatgtgaatcatatgcaaaaagaagatgaacgtgcgctgtgttggttagctgagaaagggacaaatatttgttttgcctctggccgctttacacacagaattgatgaagttgtaaaaaggttttcattcccatattacacaactggcttaaatggagcgacaatgttacttccggatgggaatttatttcatgaatcgagttttgaaaatacggttgctcaggaaatatatcggtatatacataaaaaaggactagcggatattgtttgtgcaaatgagcagcgatatacaaaaaggaagaatgaacatcaccataattttgaagcatatatgggcgtgcatatcgctgaaattgaagcgttagaagaagagtttggtaagactgtacaccctgcaaaattgtttgtttttggagaagaagagaaaattgtgacgttagatcaagagctacgagatacgtttcaaggcgaagcggaagtttttatatcaggtaaacgctatgttgatattatgccaagaggcgtgagtaaggggagtgctctaaagcgactaatggatcatttgcaaattgaagcaaatgaagttgcttgtattggagattctttcaatgatatttctatgtttgaagtaaccccacattcatttactcttcatcatgcccatccatatgtaaaggagaaagcaaatcacatagtgcgttcggttgaagaggctgttatgaaattaccgttacttgtataaaaaagaagcccgtcattggcgggcttcttttttacttgaataaagatttaacaaaatcaatgatacttgagaagaaatctttcactttatctagaaaactttgcccttcttcagatcctaaaaaggcagaaacatgttcttttgctttgtttaattgactaccaacttgattccaatcgatattaagattcttcattttatcaaataacgatactaagttatctaactgttcatctgttaatgtaatgccgagttggtcagcaatttttttaattaatgaacgtaaatcttctgttgtttttggctgttcttttgcaatttcttctttaatttttgcaacaagttgaactgctttttcttcaccaattttatcaccaagctgggctgtttgtaccatttcttcattcgctacttttttaacttcttcaggaatttgtttattggacgcagtttcgtatgctttcattaatccagttaaagctgcagttcctgaaactttaaaaggtgcagtaatttgaatttctgcatcttttacacctgctgtaatcaaagcgttagtgtacattgcatctgttacccagttaatgttctttgatcgtacaataagaccagatcctggttttgtgtatgtaatcatagaagaagaaattgctctcgtaccaatttgtgcttttggaacaatgccttctagaaatttatgttcttccgcattagatacagtgataattgtagcatcttttggtgttttcatttcttttaacagatcttgtttttgttgttcggataagttctctcctaatgtaacaattgattctccctcgatgatgtctgcaaatgaagctgttggcatcataaataccgttacagctaatagcagagctaataatttcgttttcacgaaaaatcgctccctttctctttctaaaattttcgggcaacaaagttattatagtatatatttcttatttgtcacctagctttttccacatttcaaaaaagaagtatctagattgtcggattctttttgtttctagtcatgaatgtggtaatatagtgctgagataattgaaaggagacatatacgcatgaaaactttaggatacatattaatggaaaacggtgaaaaaatcgacttggaatttttcccagaagaagcaccgaaaacagtagaaaactttaaaaaattagcagagcaaggattttatgatggtgtgacattccaccgtgttattcctggcttcgtaagccaaggtggagacccaacaggtacaggtgcaggtggcccaggttactctattccatgtgaaactgatggaaaccctcatagacaccttgtaggatcactttctatggctcacgctggccgtaacacaggcggtagccaattctttatcgttcatgagccacagccgcatttagatggtgttcatactgtatttggtaaagcaacaagcggtattgaaacagtattaaaaatgcgtcaaggcgatgtaatgaaagaagttaaagtttgggaagaataaggtaaggaaaaagagagcttttgctctcttttttatttttaatgagattgagtacttcttctacagctcatcatacaagtagtattgttgctaaaatatattgcttgtgagaacaaacctttaaccaattacatagaatacattacattatatgtttcaataaatattttttgttatattaattttgctagaattgtgctgctttagggtaactatgaatgaagtgctgttgaatgatatgtttctttccattccatataaaattttctttttttaactctatttattaaaggaatagtgctgaaacatagatttgactttcttcttttcgctttgtatgattatcaagttgttttagactcttctcactctgttgaaaatattgtaaaatgaatgtgatatgaaaagagtgattgaggggattactagtttgtaacttttgtaagaagggataagggttatgttaattcgttttaaaaaaagttatgaaaaaattgcaatggggcttctttcgtttatgccaactgaaaaagatgtgaaaacattacaattgacaatgaaagaatatgaagcaaaagatgattggcaattgtatttgtggaaagaaaatgaagattttgttggaataatggggattgtaaaaaaagagaatcaagtattagaaattcagcatttgagtgtgaacccgtctcaccgtcatgtggggattggaacgaagatggttcaagagttaaagagtaaatttcttgagtttacaatttgcggaaatgagcaaacggcaagtttttgcgaaaaatgtaaagggctagaacaaaatatacattcgtgaaagcagagataagtagtttattatctctgctttcttttttgtaattgttcgtttcgttcagtaatgacctctgtgcgatcacgcaaagtgtgcttgtttataatatattcacctgggatagcattcaagtctttccaagagaggttttgtttttgacataactctatgcactgcttctctaacgatgaatctgataagggtaaaaataaaggtacaaaacgttcttttttatggatagattgcaatctttcattgagcaaggaaagaagttgtacttgattaattcctaaacgttgtaaaggcacaccgcttttttctaaaattgtgattgcgcttttcatcatttttgtggaaccattccaattagcacgtctttggtggtataaagaaactgcgatttgaatgagaccaactaagtaatgatcacgattacctcttggttttgttttccaatactcttctagtatttcgtggcattcaaaatagtcataatctccatggaaatgaattaaaaattgtatgtattcggtaggatacatgttttctcgctcctatctaacggttatacatataagtgtatcatagaaatatgaacaataaacgactaggaggtttccccctagccgttattgttcatattagcagaagcaagctgctcctacaataattagtaaaataaacagtacaacaagtaatgcgaacccaccgctaaaaccacaatcaacgtgacccatagttttttgacctcctacattgttcttactacactgttatcatatgaagtggtgggcatgatgacataggcatcggtctatttttaattaaatttcttaaaaaggttggatagaacatgagtatgctctatacttatgttgttatagaaaaaatgtggtgggatgctttgtgcaatataattttaaagtagaggcttttgaagggccgttagatctattgttacatttaatacatcgttatgaaattgatatatataatattcctgtagcagatattacagagcaatatttatcttatgtgcatacgatgaaagaacttcaattagatgttgcaagtgagtatttagtaatggctgcaacgttattacaaattaaaagtaagatgttgttgccgaaacatgaagaagatgtacttgataacggtgatgattttatagatgatcctcgtcaagaattgatggagaggttaattgaatataagaaatataagcaagttgctactgagttaaaagaaagagaacaagaaagagcacagctatatacacgtccaccaattgactttacatcgttgcaacaagaagaggagacaagcttacctcttgatgttacgttatatgatatgctagcagcatttcaaaaattaatgcgccgtaaaaaggcaaaaaaacctgtaacaacacgtattactcgtcaagaaataccaattgaacagcgaatgactgatattttaaagcagttaaaaataaagggtggtcgccaaagtttttacgatttgtttgttgatgatgaacgtgaaataatggttgtaacatttttagcagttctggaacttatgaaaaatcaacaaatcataattgagcaagaacataattttgatgaaattttcgtatcaagctctaataaatctgcatagagcaagtatgtgaaaatgggatagaaacattttatctcatgctatgttttaatgtatcgtttggaacaagagaaaaaatattgaaccgaacgcattaattgtgattcggttttttgatgtgtatttttatgggaaaatagaaggaaggagctcgtgaaatggataggaaagaacaaaagtcaattattgaaggccttttatttgtttctggtgatgaagggatttatccagaacaaatagcgaaagttcttgaaattgaaatgaatgaagtaattaatattttagaagaaatgcaacaagaatgtgaaggtgcaaaccgtggtttgcaaattgtacagtatgcaaaagtatatcgttttgctacaaagaaagaacatgcttcatattatcaaaaattaatagatacaccaacagctgcttcactctcacaagctgccctcgaaactttagcgattgttgcatatcgccaaccaatcacaaggactgaaatggaagagattagaggagttaaaaccgataaggcgttacaaacgttggtttcacatttacttataaaagaaatgggaagagcagaaggaccagggcgtcctattttatacggaacaacaaaagaatttttggacacatttggattgaaaacattagatgatttaccaccgctttctgaagagaatgaacaaatgaatgaagcggatttattcttcggttccttacaagagatatcgaaataaaagcttagcattttgctaagctttttttgtatatcaattatttacagtgccatactaaatgaaaaaaggagacgagttatgagaagtatgcggattattttattattagtttctgttttattatgtttttctttaaatagcgcatcagctaaaaggtatatgatgtccattcatactacgtctcctttacatatgcatcggcaacatcttagtaaaatgaaagtgagctttttaaaagtggggcaaggtgacgcaacacttattataatgccaaatggacaaacaatgttaattgatggaggaccttatgaagcaggagaggttattattcagaaattaattgagaaagggattaatcatctagatgtaattgtcagtacgcatcccgatatggatcatataggagggttaattccaattgtagagcaaataccggtatcgcttatattagatagcggaaaaacatatagttctcttacttatcatacgtatcggaataatattaaaaaaagagggatacctttcgtttcagtaaaggaaggacaatatataccgctggatccacatgtttctatacaagtattaaacaacgggaaatcaaaagatgaaaataatgaatcctcaattgttttaaaggtgcgatatggaaaagcggattttttattaatgggtgacgcggatgtacgaacagaacatgaaatattaaaacaatttgatgtccatgcagatgtgttaaaagtggggcatcacggctcatatacttcaacaagtgaaacgtttataaaaaaagtggaaccgcagtttgctattttgtcgtacgggagtagtaatccgtatggacatcctcaccaaagtgtagtgaaacgcttaaaaaggcacggtataatggtatatagaacgaataaacgtacagtagaaatggaaacagatggtgaacatattatgttagagtctagcgggttaatgccattattgaagtgatttctatattagggggcgatactgtccctttttggaaaaatgaataatatatattataattataagagacgtaagaaatttccttttctgttgaataaaaaggaaattttattagaatgtatagacaactactcgtgtgtatattaagatggaactaggcgaataaggtaataataacaagtaggtaattcatgggaaaggatcgatgaaaatgaaaacgcaaattgtcatcaatgccaaaatttacacaggtcaagaaatagtggaaaacggatttattcgttacgcagaaaccattaaagaaattggtttgatggctcaatatgtaccacaagaaaatgaaactgtttttgatgctacagggaagattgtaattccaggtatgatcgatgttcatattcatggtggatacgatattgatgcgatggatgcaaatagcgatgggttagtaactctaggtaaagaaatgttaaaagaaggggttacaacttacttcccaacaacaatgacacaagctccagaggcaattgaagcagcgttaactgctgcaaaagaagcaaaagaaaaaggagcgcattttgaatatattcacttagaaggaccttatgtttcaaagaaacgtgcaggtgcacaaccacttgaacatatcgttcctgcaaatattgagcaatttaaacaatggcaagaagcaagtgggaatttaattaaattagtaacatatgcaccagaagaagagggagcattagagtttgaacaatatcttgctgaaactggtgtagttggcacaatggggcatacagatgcaattgatgcgcaactaaaaaatagaaagattacacatgcgacacatttatacaatcaaatgcgtggattacatcaccgtgaaccaggagttgttggtcatgtgttattaaatccagatgtaatggttgaagtaattacagatggcattcatattcaccctgatatggtgaaattagcatataagttaaaaggaccaaaaaaagtaagtgttattactgacgcaatgcgtgcaaaaggtcttgaagatggattatatgagcttggcggacagccagtacatgtaaaagatggtagtgctcgattagaagatggaacgttagctggtagtattttaaaaatggatcaagctttccgaaatgtaattgaatttacaggttgttcaatcgaagatgcagtactgatgacatcagttaaccaagcagaagagtttggattaaataataaaggtgcattagcggtaggaaaagatgcagactttgttgtgatgaatgaagatttacatgtatatgatacggttcgtttaggaattcatatgaaggaagggaagtaattaaatgaatattcttgttgtaaaaactccagaagaactagcagaagcaggttataaattaattgaagaagttgtaaaaacaaaagaaaatccaacattaggaatggctacaggaagctctccattaggtatttatgcagaaatgcgaaaaaataaacttgatacaagccgtgtaaccactgtaaacttagatgagtacgtaaatttaccacatgaagataaaaacagctatcactatttcatgcaagaacagttgtttgatcatcttccatttaaacaaacttatgtaccaaacgggatggcaagtgatttagagaaagagtgcaaacgttacgagggcattctagctgctaacccagttgacctacagattcttggaatcggtgaaaacggtcacatcggatttaatgagccaggaacaccgtttaattctccaacaaacattgttgaattaacagaatctacacgccaagcaaaccttcgcttcttcgagaaagaagaagatgtgccaactcatgcgattacaatgggaattggaagcattatgaaagcgaaacaaattctactagttgctatgggttctaaaaaggcagaagctgttaaagaattattgcaaggtgaatatagtgaagagtgtccggctacagttttacaacgtcatccgaatgtaaccgtaatcgctgatcaagaagctctatctttatgcagtgaggcgattgctgatgaacatcgacaagtattcaccatttccgatctattatcagattcaagagtgggtgaaacagctaattgaggacggcgaatggaagccgggagataaaatcccatctgagaatgaactttgtgataagttcgaagtgagtcgaatgacaatcagacaggcgattaataatttagtggaacaaggctatttatatcggaagcgtggaattggaacatttgtccaacttccgaaagtggaacaaaaattgcaaggaatgacgggattcacagaagacatgatttctcgtgggatgaacccaagtagtcaattacttagtttccgcctagttccagctactgctaaaatagcagaccggttgagaatacaggagggggaatcggtttatgaagtgaggcgtattcgcttagctgatgatgaaccgattgcttttgagacgacatatttgtcgccagctcttgtaaaagatattaacgaagagatattgcaacaatctttatatgaacatttagagaaaaaactgggctttaaacttgttagcgctactcagtcaattgaagcttccgttgcgacggaaaatgaagctgaacatctgcatattcctaaaaaggcgcctgtacttgtaatgcgtcaatggtcatattcagaaggtgaggtaccgctagagtacgtgaaatgtatttatcgtggagatcgttataaatttattacgaatatcgcacgtaacaaatagtatatttcagtttgtgaagtacagtggaattgaaaatggttaacatgtaaagaaataaaaatacgactcatccttataaggaatgagtcgtatttttattatgagcaattacgtggttaacagcatctttgacgtgatttactacatagtgagcgtgattttttactgcatcatctgcttgtgacatagcaaaactgtgaggagttaaagaaaacataggaatatcattgtaagaatcccctatacaagcaatttcctcaggttttatttgaaactcatttaataaaacagaaatggcagagcctttactaacattcggtggcattacatctaaacattgttctgctgagatgaaagtactaactttcccgtggaatttttcatcaatttttttctgaaggagttgtaagctctcctttgttccaccgacagaaattttatttgggaaaatcgtatcatcaatcttctgtagtaagtttggttcttcaacagaagtcatagttacttgttgttcaagttcttgaataaaaggtgttttctcttcaatgtaataattatgctcatcacttacataacggaaataaggatcttcattcgtcatagctaacaaatcgggaagtatgctggaatcaaaagttgcagataatagttgtttattttcatgtgtatatacaaaaacaccatttacactaatgcgatgaaaatttgtatttacagctttcattaagtctgcaatttcattatcaagtcttccggaagcgaagcaaagaataacattttgttcggcaaggctgcgtagtgccgcaacatcttgttcatcaataagacctccgtgttgcatcattgtaccatcgatatcacttacaaacattttaatcatgctgttatctcctttctatgtacagttgctcttacattatacgcatcatatataaacatgtctaaaaaatgaatttttattaaatggcagatgttttacattgacgacaaagaagaatattctgtaacataaaagtaggctatttaagtacgagggtggtgttatatgagtaattatctagaaattaaaaaagttttaaataataatgtcatcattgctagccatccggaacacgaggaagtagtagtgattggcaaaggaattggatttgggaaaaaagcgaaagatgtattggagcaagaacaaatcgaaaaaatgtttgtcttaaaaaatgaacgtgatcgtgaacaatacaaattattagtgccgcatattagtgaaaaattaattgaattgatgaacgatattatgctgtacattcaagaaaaagcgaaatctccactaaatgaacatattcatattgcgttaacggatcatatttcatttgcgattaaaaggttaaaacaaggacttacaattgataacccttttttagttgaaacaaaaatgctctatccagaggaatatgaaattgcggaaggtgttgtacaacttttaaattctcgtttgcaaattacattgccagaaggagaaattggttttattgcacttcacatttacagttcgcttacaaattctgatttatcttcagttaatcaaaactcccgtctcattgcacaacttgtatctttaattgagacaaacttacaaattacattagaccaagagagcattcattatttacgccttattcgtcatcttcaatatgctattgagagggtgaaaaaaggagaaaaagtagaagaatcgcaaagttttgctgatttattaaaggcggagtatccagtttgctataacttggcttggaagctagttaaggtcatgcaaaatgagttgcaactacctgtatatgaagctgaaagtatttatttaacaatgcacttgcaacgcttagtgaaggcagagcatgtgtaaaaagtcatatatttttgtctaaaatgaaaacgttaaaaaaaatgattgaatcgcttacaatagttatgtataataactattgcaaagttatacaaatttcgacaaacacattaaggtgagtaacgaaaacgtttgccttaattatagtgaacttatacgtaaacctatttttgacacgtgttactgattcgatcaggcatgagtggagaaaagtaaggaatgtaagctagagaaagggatatactaccctttgtatagctatcgttctatctttttttcctcatgtctttttggcgtttgtcggaaggtatcaatatagataagagaggaagggtttccatgtttaagaagatctttggtgttcttcaaaaagtcggaaaagcgttaatgcttccagtagcgattttaccggcggcaggtattttacttggatttggtaatgcatttcaaaatccacagttaacaaatattattcctgctttaaaagcagattggttcgtaatggttgcaaaaattatggaacaatctggtgatattattttcgctaaccttgcattattattcgcagttggggtagcaattggtttagctggtggagacggagtagctggtttagcagcattcgtcggctacttaattatgaacaaaacgatgagtgtgttcttagaagtagataagctagtgaaagtaacaagttctggagcagacccagtaaaaattggatttgcagatccagcgtatgcaaacgtattaggtattccaacgctacaaacaggggtatttggtggtattatcgtcggtatagtagcggcatattgctataataaatacttcaacattgaattaccatcatacttaggtttctttgcaggtaagcgtttcgtaccgatcgcaactgcaacattctctttaatagtaggtattatcatgtgcttcgtttggccatacattcaaggtggcttaaacacgttctcacatcaaatgattgatgcaaatagaacaattgcagcatttatattcggtttaattgaacgttcattaattccatttggattacatcacattttctattcaccgttctggttcgaattcggtcagtatacgaatgcagctggcgaattaatccgtggtgaccaaaaaatctttatggcacagttaaaagacggtgtagaattaacagcaggtacatttacaactggtaagtatccgttcatgatgttcggtcttccagcagcagctttagcaatgtaccatgaagcacgtccagaaaataaaaaattagcagcaggtattttaggttctgcagcattaacatctttcttaacaggtattacagagccacttgaattttcattcttattcgtagcgccagtattattcggaattcacgctgtatttgctggtctatcatttatgacaatgcaaattttaggtgttaaaattggtatgacattctctggtggtttaattgacttcctattattcggtgtactaccaggccgtacagcatggtggtgggtaattattgttggtcttgtactagcagttatttactacttcggattccgctttgcaattcgcaaatggaatctaaaaacacctggtcgtgaagtggcaaatgcaaatgacggcgcaggaaaagcagaagcaggcgaacttcctcgtgaagtattagtagcacttggtggtaaagaaaacattgcttctttagatgcttgtattactcgtttacgtgttcaagttaacgaacaaaagaatgtaaacaaagaccgcttaaaagaacttggagcagctggtgtacttgaagttggaaataacattcaagcaattttcgggccgaaatctgacacattaaaatcacaaattcatgatattatgtcaggtcgtacacctcatgttgaaaaagaagaacctgtaaaagtggaagaaactcctcaaaaagttgatgaaaatgaaacaattgtatcaccaatcgaaggaaaaatcttaccaattacagaagtacctgaccaagtattctcaggaaaaatgatgggagacggatttgcaattgagccaactgaaggaacagtagtttctccagttaacggtgagattgtcaatgtattccctacaaaacatgcgattggtattcaatctgaaggcggaaaagaaattttaatccacttcggtattgatactgtaaaattaaatggtgaaggttttgaagcgcttgtagcacaaggcgacaaggtgaaacaaggccaaccattattaaaagtagatcttgcatttgtaaaagaaaatgcaccatctatcattacaccaattgtctttacaaacttacaacaagggcaacaagtcgaattgaaaaaagatggaaatgttaagaagggcgaaaccgctattattgacattcagtaggaatttgacgcaaaatgtttataattataataggcgatgtggttgaccgaacatcgcctattatatacaatagatgatgtagtactcacatctatacaactaaaaaatactgtaatttaaaggagataaattatcatggaaaaaatctttaaagtaactagcgactcaggaattcatgctcgtccagcaactctacttgtaaacactgcaagcaaattcggttctgacattaacttagagtataacggaaagaacgttaacttaaaatcaatcatgggcgttatgtctttaggcattcaacaaaacgcagaaattaaaatcactgcaaatggtgatgatgcagctcaagcactagcagctatcgaagaaactatgaaaaacgaaggattaggagaataatgactcttaacattcaagggatcgctgcatcaagtgggattgctattgcaaaggctttcagacttgaaaatcctgaatttaacatcgaaaagaaatcaattacaaacgaagctgcagaaattgcacgcttagacgctgcgcttgaaaaagcaaaaactgaattagaagctattaaggaccacgcatttgctgagctaggtgctgacaaagctgcgatctttgaagcacatttattagtattaaatgatccagaactagtaaacccagtaaaagataaagtaaatagcgaaaaagtaaatgctgaatttgcaatggatgaagttgcatcaatgtttatttctatgtttgaaaacatggataacgaatatatgaaagaacgtgctgcggacattcgtgacgtaacaaaacgcgttcttgcacatttactaggaattaacttctcaaatcctggtacaatttctgaagaggtaatcatcattgctgaagatttaacaccatctgatacagctcagttaaaccgtaagtatgcaaaaggtttcactactgatatcggtggacgtacatctcactctgcaattatggctcgttctatggaaattccagctgttgttggtacgaaagttgttatggagaaaatccaaaacggcgatatcgttatcattgacggtttagatggagaagtaattgtaaacccatcagaagaaactcttcgttcgtttgaagaaaagaaagcgaaatttgaagagcaaaaagctgaatgggcaaaattaaaagaccaagctactgtaacaagtgacggacatcacgttgagcttgttgcaaatatcggaacaccaaatgatgtacaaggtattatcgataatggcggagaaggcgttggcttataccgtacagaattcttatacatgggccgtgacaatcttccaacagaagaagagcagttcgaagcgtataaagcagttcttgaaggtgtaaaagaaggtcaaccagtcgttgttcgtacacttgacatcggtggagataaagagcttccatacttacatttaccaaaagaaatgaatccattcttaggataccgtgcaattcgcttatgtcttgatgaacaagatgtgttccgtacacaacttcgtgcattacttcgtgctagcgtatacggtaacttaaaaattatgttcccaatgattgcaactcttgatgagttccgtcaagcgaaagcgattttattagaagagaaagcgaaacttgtagaagcgggtacaactgtttctgattctattgaagttggtatgatggttgaaatcccagcttcagcagtattagcagaccaattcgcgaaagaagttgacttcttctctatcggaacaaatgatttaatccaatacacaatggctgcagaccgtatgaacgaacaagtatcttacttataccaaccatacaacccatctattttacgtcttgtaaaaatggttatcgatgctgctcataaagaaggcaaatgggctggtatgtgtggtgagatggcgggcgattcacttgctatcccattattattaggattaggtttagatgagttcagtatgagtgcaacatctattcttcctgcaagaacacagctaagcaagttgtcaaaagcagaaatggaaacattagcagaaaaagcattaaagatgtcaactgctgaagaagttgttgaactagttaaaagcatataattaataaaaaaacctgagccgatttgaaatcggtctcaggttttttctatgagaaaagtaaatcttatttgcttactattgaggataagagacagaattagatagcgattgcaacgatatcagttgggcatacgcgtaaaataccagtaaaagtatttcgattttgattgttcttatcgtctttattgttatctttgttatctttgccattacgagctaaagcagagaaaagagcaacaccgttacagaaaccttcaaaaattacattgttgaaagtaccattacctctaatgcttaaaagagaaagctctgttccaactgaaatgctagcaagtacgttacatacagctggttgttgtggtctaactacttctctctctttctcacgatggtcgcgatggtcacactctctttcacgatgatgacagtctctaaagttatcacagcatccaaatgatccaaacataatcctcatcacccccttcacacttataatctatgtaagttcggtagttagtgactggacagagagtggaattttttctaggggattttctcattttaaatgactagctgggtgtttagtatggaatgatgtttaaaataggggagatataacaaaaaatgtaaaaaccaccgaaataaatgaaatgggtagcctttacacttttttacttttatataaaacgatgatatatacgggaagagctaggagtaatggtacaatggatcgtgcagtgtgtttttctgattctaattggaatgcttcttcttttggaaattgtaaaatggagatgtttgcggcatcaccaataaaatatagaagcagtacagttactatgtaacataaaagtgcgataaagcttccgtatgaactcaatgaaaatccctctcttgttatctatttgttatcattgtatcacaattgtaacaaaaatacacgggtatatttcaatgccttaacaaaattcgacacgaaacgtcacgtttatttatgataagggaatagaatatacttttccataagtataaatgtcgaatgatttgtagtaatattacaaaagtatgacagggaataaaaaaacgaaggcaatgtagttgccttcgttttttattattttgcccactcgctcacttgctctacgctcatgcgaggtgcagggtggccttttaaagttgattcaccaattgtaataagcataattggaacgtaacgagatgaaacgttaaattcgtctgtcagtgcttgtgggttgaagccaccaatagcacaagtatcccaaccagttgctttagctgcaagcataagttgcattgctgctaaagatgcatttgaaaaggcagcatctcttgggaattgttcacgagcatatgcagattcaatatttttagctaagcgttcttttgcttcttctttcataaatccttgttctacaattggaccatatactggctcaacatttttataagcttctaaatcacctaaaatagcgactactgcagaagcatcaagaatttgttgttggttataagctattgggtgtaatcgtttttgtacatcttcaccttgaaaaacaaggaatttccagtgttgtaagttccaagcggaaggtgcttgtgctgcggcttttaaaatctcatgtaattctgtagatgagatttctttatttgggttaaatgcacgtgtagatgtgcgttcatatagaacatcaaaaaagttgtcgtttgtcattgtatatcctccaaattgtatatcgaattattttcaaaaaaataatatacactacttacattttgtaagttatcgaatttaagaatataatatctttattttaattgtcaagttttaaaaattagctagggcattcatacaaacgatacaattcctacaatcatacactaaaaaaggaatttatagagtgaaaagcgaagataacattctcaattagcttgttaatatgtatctctcacaaattaaagtttattggagaccagtcttttaaaaaagtttgtgaggaattcagtagaacaagatatatgaagtgagtgaagactagtgatgaacatactacattttttattagagaatacggttttccaaaatgtgttacaagatctgcagttaaatgtcctttatatagaaaatggatgtaagcatcaacaaacggtagaaaatatccatccaaaatgtatgtttatagcaaatagttttgaagagggcgaactattatttcaaagaacgaaaccacacattatcattacgtatgtaacagattattctcaaataaaatatataaagaatatgtatactccgcacagtacattcattgtcatttgggatcaacaaataacaaaagaatttacagatgtacttgcattaggaatacgtaatattgtaatagctcctgtaactccgcaagcagtgttagaggaagtgaataagagtttgtatcaactttctttagtaaggcaagttagtttgcagcaggaattgcttcaaacgatgtttgattttcaaaatgatctattatttatagtagaagatgatgaaatagttgattgtaatacaaattttttagcttttttcggatatgaaaatttgtttgcctatcgtgagcaacatttggtatttgctgaacattttattagagaaaatggatactactcgacgacgcatgatataacatggctagacgatactttatctagtggtagaagaattaagatgttaaattatgaaggggcagtatctacttttctattacgtgcgacaccattgccagaagatttatcaagatttattgtaaagtgcacggaaattacagaattagatgaaatctatcaagaacaagaaagacttgctatgatagattcattgacagagatttataatcgtttaaagtttcaacaaatactagaggtagaatgggaaaaggtaatacgtagtgatgagaaaatagcaatcattttatttgatatagataattttaaaacagttaatgacacatatggtcatgattttggcgatttagcattaatacaacttgcagagcttatgaaatctaaagtggagcagcaacatgtatttgcaagatggggaggagaagaattcattatattagtgacaaatacagtagaaaaggaagcatttcaagttgcggagtcattacgattctttattgaaacaaagcaatttactggaatttcgaagttaacagctagctttggagttgcgttatatgaacaaggaactacaagagaagaattaatgcaacgagcggacattgcattatatgaagcgaaaaaaaatggaaagaatcaagtatgtgtgtatagaaaagaaaaaatgtaatttttcgcaacaaattgttgcgatttttttttattgtttgataatagaataggggggataatttttagcgaaggaattatggaggatcaatatgataaaaaaagtaatggtgatggcttcactgtctgctatagttggcggcggagtatactattttcttgttagccccaatataaaggaaaacactgtattaacaactaaagtgaatcctactattgaatcggaagtacaagggaatatagaagaaaaagaagagcaacaaattgattatgctagcatatctcaaaaattagatcaatatttagtcggaaagcaatttaatggaacagttttggtaacagataaagagcatgttatattgaataaaggatatgggtatgctgatgttcaaaataaaatagaaaatacgcctcaaacaaaatatcgtatcggttctattacgaaaacagttgttgccacatctattttacagttgcaagaacaaggtaaattgaatattcaagataatgtaaataaatatattccttcatttccggagaataaaaatattacgctatatcatttattaacgcatacctctggtttacctgaacatgcgaaaggaaatgtgaatgctgcttcccgtttacagttaattaattggattggacgtcaaaatttagaatttcctgcaggaacaggttggagatatacagattataattatatggttcttgcttatataatagaacatatctccaaaaaacctttaggagattacataaaagaaaacatatttataaaagcagatatgcatgaatccggtatgggaaatatggtacctggagataaaaattttgcaaagggttatgtgaaaaaagataaagagcttgtaccagcgcagaagttaggcatggattggctatatggttgtggtgagatgtatacgacagttggagatatgaagaaattagacgaagcaattataaatggaaaacttctttctgaacaaagtatacaagcaatgttttcaccttcagcagaacggaaatatgcatttagtttttatatatatccagattattttcataatcatggtgtattatctggttggaacactttcaataattttaataaagaaaaaggaacttttgttatgttattttcaaatgtgaaaaatagtatggatgatgactttaataaagagttccgaaagatggtaaatgatttattagaacaaaggggatgagaaaatggaacataaaactttatcaataggtttcattggtattggcgtaatgggaaaaagtatggtttatcacttaatgcaagatggtcataaagtatatgtatataatagaacgaaagcaaaaacagattctttagtgcaagatggtgcaaattggtgtaatacgccaaaagagttagtgaagcaagttgatattgtaatgacaatggttggatatccacatgatgtagaagaagtgtattttggtatagaaggaattatagaacatgcaaaagaaggtacgatagcaattgactttacgacatctacacctactttagcaaaacggattaatgaagttgcaaaaagcaaaaatatatatactttagatgcacctgtctcaggaggagatgttggcgcgaaagaagcaaaactcgcaattatggtaggtggagagaaagaaatatatgatagatgcttacctttacttgaaaagttaggaacaaacattcaattacaaggaccagctgggagtggacaacatacaaaaatgtgcaatcaaattgccattgcttccaatatgattggagtatgtgaagctgttgcttacgcgaagaaggctggactgaatccagataaagtgttagagagtatttcaacaggggcagcaggtagctggtcattaagtaatttagctcctcgaatgttaaaaggagactttgagccaggattttatgtaaagcattttatgaaagatatgaaaattgctttagaggaagcagaaaaattacaattaacagtcccaggcttaagtttggcgaaagaattgtatgaagagttaattaaggatggcgaagaaaatagtggaacacaagtattatataaaaaatatataagggggtaaacgaggtggaccttcaaaagtttgatgagatgattgatactgtacagcgagctacttgtatgcaaattaatgaaagacaaaaagaagcttttaaacaaaaatatgattttgaaccagaatttgaatatggaagagatgagaaggggcattatgtaattcgaacctcaaaaaagatgttagaagaaatggagttttatttagcattgaaatatgatcgtgatggagtggatctttatatgcaagctgagattgacggcatattttatgtatctattagctatggtgaagatgccctacatctacaagaattgtttcaatttctagaagaaaataaataaaagtcctcaaatgaggacttttatttatttagtcatctttaatttttataattataagttagaagcccggcggcatcgttcaaccgggaacgggataatttgtgcgatgtgattagggccaaattgttttgtacgagcatggcgtattatataaaaagcacacagaattgaaacaggaatagcgccgaataaaccaaataataaagcgcttacacaagatgcgacaaatcctaaaacaccaatttctaactcttccataatagctcctaaaataacaggaaatgctccacatgtaactccaagtataagtgcgataagtaagctcatgattatccccctctgtttgcgatattattttccttcttagttaattgtagtatatcacatataaaacagaattttcagaaaaaatttaataaatgttcaaaaaatgttcgaaaaatgcacttgaaaaatcaagatgttaaatttgtgatgaaatagtactttcaagtaaataaaaaatcaggcttatttcaaaatgaaataagcctgttccataggaggatgtatatatgtagagtgaataaaagtttggaaaagggggtccaagtccttttattcaactaactaccttaatagattggaacccagccttcagttgtcacaaaaatacgaatagctacaacttggcgatcatcttgcaaggtaaaataatgtcttgcattttcaggaacagatattaaatcgcctggctcaagttcaacatcaaagaatttcccatctttaccttcaatagcgaaaatgccatgaccactgacgataaagcgaacttcgtcatctgtatgatggtgttccttttggaaattaattaataattcgtcaaggttaggggtgctatttgaaagtgaaattacatcatgtgctttataaccacggcgtgctgaaacatcagcgatttcttttgaaaacacagctaatatttcagctttgttttcatctgttaacgaataattttcatttaaatgagtaggaagtttagaaatattccatttctcatataaaacgccttcctcttgtagaaatttagatacttccacttcattttcaatacgagtatttacttcatgaatacgaatttgcgccattagaaacgcctccttgaattgataatagttttatatgaaattggaataaaaactcataagcttctaatctcttctttgcatcaaagctatctcggccccatacagtaataccgtggttacggattaatactgcacccgaatctccttgtatatgctttcggaagttttctccaagcgttgggatatgggcatggttttcaataataggaatttgaattgttgcaccttcttcccaaatatcgagtgctttaataatttcttgattttgaagggtgactgcatcactatataaatttgtgatgacattattatcagttgtatgaacatgaagtacgcacccggcattcgtattgttataaatgtgtgtatgcaatattgtttctgctgaagggcgtaattcagtctctaaaacgggaactcctacatgatctactaatagaaaatcatctggagtggtttttgttttatctttaccgcttgctgtaataagaaaagtaagtggttcatggctaacctttatagaaatattaccacttgttgctggaaaccaatttcgtgttgttaactctttttttaactcgcttaagtcataccattgacgaaaaagttgtttcatgccttcacctccaacaaaagttttaattcagcttgcacatcttgaaatgtttcaaacggtgtataagcaatatgattttcttcacactttgtaataagaaaatcgcgagcgaatactttatcagcttgtttcgcggcttgtaaatcagtaatagaatctccaattacaatatgaaagtcatttgtatcacttaatttacggattaatgatgatttacataatccgcaatgattttgacaatgatcatcacaagaatgaggccatttaactgtaataaactctgctgaaaagtctgtttcattacaataaatttgctcttttggaatgattccttgtaagagtggatagacgaagaaatccattccacctgatatcacgtaaaaagaaatgttattttcctttacgaattgtataaactcatgaaaaccactacggatttcagcagtttctattaaaaattgaataatatcatcgtgcagattagtaggtattaattgaaataatcgagaaacaccttcttgaatggatagttcttgtgataaaattttattctttacttcttcggcttctggtggtgcgaatttttccataatggacataatgttatcattatttgtaatcgtgccatcgaaatcacaaaatacttgaatactcataatttcacctcataagagggatttccccatatttgtagtgcactatgcaaatttatgtcgtctacttcatggagtggtttattttgcaaagtagcatcaattgcagtacggaaagctttaccgccgccttgcgctccatttggatgtccgtgtatcccgccgccagcattaataacaacatctttaccgaaatctcgtacaataaagggaacgaaaccaggatgaataccagcagacggaacagaaaagctcttcttgaaaaatgcatcgtcttcagttaaatattttgagatagcaagagcctcctctttttctagcgcaacacttccgtatggagatgggaataatgaaaagtcagccccagcataacgtagtagctttccaagtaataatggtgatgaaactccatataacttggatgctgaataagcaccacttacagcaggatgtgccataataggaactgggatttcatcatcttctgcaagtgattgtagtacatctagtccgtaagcaaatacgttaaataatagaatatcagctccagcttgcactgcacgtttagcattttcttttaaatcaaaagttcgtcctgttaaatttaaggcatataacgttttatgaccgtatgtttcgtagacagattgtaaaacttcttttccagatacaatgcgtttcgtaagtggtgttaatgcattttcaaataatatttcatcatcttttactatatctacaccaccaattgcttgatcgcgtaattgtgtttttaaatacccaatgtttcgtccaatcattcctttaaaaatactcattaaaaggggacgatcatgcacttgtaaaagatttcgaataccatctatcccgaattttggaccaggaaaatgtttttttaactcgtctgaaaaagttaagtcaattagttttacttcgccatcaagtgatagctttccaaatgtagtcgttaaaatcgctggtaaatctggactgaagtttaatagcggatattcgattttaataattccgcgttttacttttttacgtaaatacgaattggtatattcatgttcagctaattcctcaacatgaatgacgttgcctttatgctgctttaattgttcttgcaataagtgtggcaaatgagtccaagagccaattgttaaaccgagtgcaatttgctcagcttttttttctaagttatgtgaatcatcatggattaaatacgtcgctataattccgctcattgttataacctcctagttaaataaaaaaacctctcagctaaggagaggtttttttacaaccagctccttatctgtcagcgtaatgctgcgagaattagcaccgtgtctacaattgtagatcggttgccgggtttcgtcgggctcgtccctccacctgctcttgataagaagtatttagaaatgtttaaatttttaagataactgaattttgtcagatatttttcgtgttgtcaattactttttgaaaaaatttaatttatcaattcgattaatggcttcccgtaatctatcttctgcatgcaagagaccaacacggacatacccttccccatgcttaccaaatccaacaccaggagcaactgcgacatgtgctttttctagtaaaatatcagaaaattgctcagaggtatatccttttggaacgggaagccatgcaaagaatgatccttttggaatgtctacattccaaccaattgagtgacaggctgaaataagagcgtttcttcgagattcgtaactatttacaaggtctattacgcaagactgtgaacttaatagcgcttctcgagcagcatcttgaactgcaccgaatatactaacatacatatgatcttgtaataggttaattgtttcaatcacactttcattccctacagcaaaagcgatgcgccagccagccatattgaaagtttttgataatgtgtaaatttcaattcctatatctttcgcaccatctgcttgcaagaaactaacaggtttttgaccatcaaatccgatagcgccataagcaaaatcgtgaacaactaatatattatgtttattagcaaagtgaatggttgcatcaaaaaaatcttttgatgcagtagcaccggtaggattatttggatagtttaaaaacattaattttgcacgctctgcaatagagtcatcaatgtttgtataatctggtaaaaagttattttctgcaataagcggcattgtttcaaagtgtgcttttgctaaagcaaccccggataaataatctggataacctggatccggaacgagaatcgtatcaccaggatttgtaaaacaaatcggtaattctactagtccagccttcccgccaaacaaaatagcaacttcagtttttgggtttaattcgacgccgtattcacgtttatagaatgtagccacggcttcctttaagctttcatgtccgcgaaatggcggatatttatgatgaatggtcttttcggcagcatcttgtaaagcttttacgatatgctgcggtgttggttgatctggattaccttgacctagattaataacatcgtgaccagctgcaacgactttgttaacttttgcaacaagtgaagcgaaaaattgtgttggcaatgatgttactatctcagaaggttgaaataatttcatactttccacctcttttgaaagttgttacaattctagtgacaaatgatataatctttccagtattttgtaaagaaaaaaataagaatggggctgaaaaaatgaaagtcgcatgtattcaaatggatattgtttttggagatgtagaaaaaaatattgagaatgctaaaaataaaataagcgaagctatgaaggaaaggccagatgttatcgtcttaccagaactatggacaacaggatatgatttaacgagactttctgaaattgcagatagggatggagtggaaacgaaagaaaagttaatagaatgggcgaagcaatatgatatacatattgttggtggttctatagcaaagcaaacagagcaaggcgttacaaatacgatgtatgttgtaaataatgaaggacagctagtcaacgaatatagtaaagtacatttatttcagcttatggatgaacataaatatttaatagccggtaatggtacgggcgaatttaagctagatgatgtcgaatgcgctggaacaatttgttatgatattcgttttccagagtggatgcgtgtccatactgctaaaggggcaaaagtattatttgttgtagcagaatggccattagttcgtttagcacattggcgtttgctattgcaagcaagagcagttgaaaatcagtgttatgttgttgcgtgtaatagagcaggaaaggatccaaataatgtatttgcgggtcattctttaattgtggacccttggggtgaagttgtagtagaggcgaatgaagaggaatcaattttatttggagagcttgaattcgagaaaattaaagaagtacgtaaaggaattccggtttttgcggatcgccgtccagaattatacaaataaaatgttgacaagtgatttttattcttggtatagtcttcaacataaagttaaaaattcaaaaaattatacaactcttatcaagagcaggtggagggatttggcccgatgaagcccagcaaccgaccgtaataccattgtgaaatggggcgtttattacgccaaaaggcacggtgctaattccagcagaaagtaaaaccttctggcagataagaggggagaagataaacttcaaacctctttcttagtggaaagaggtttttctatgttagaaaaacctctgaatttaaaaagggggagaagacgatgggatattattcattaacagaaataacagctgtacaatatgcgaaagatcatggctattttgaagcgaaggcaaatgtcgtttgtcatgaaattggagacggaaacttaaattacgtgttcaaattagatgatggagagaaatcaattataataaaacaagcactgccttatgcgaaagtagttggtgaaagctggccattgtctataaaaagagcaacgattgaaagcaaggcattacaaatttttgcgcagtatgtaccggattatgttccagtagtgtacagtcatgatgaagagttagcgataacggtaatagaagacttatcaagactaacaattacaagaaaaggattaatagacggagaagaatatccgcttttatcccagcatatcggccgttttctagcacatgttttattttatacttcagattttggtttacagtcagaagagaagagggtactagaaggtacctttgtaaatccggacctttgtaaaattacagaggatttagtgtttacagatccgtttggacattatgatacaaatgattatgagccagatttacagctcgtggttgatgaactttggagtgataaaactttaaaactaaaagtagcacaatataaatataagttcttaacaagaaaagaaactcttattcatggtgatttacatactggtagtattttttcgtcaccttctgaaacgaaagtgattgatccagaatttgcgacatatggcccatttggatttgacataggtcaatttattgcaaatctattattaaatgctttatctagagaagaagaaaaaagaagtgtactatttttccatatagaaaagacgtggagttattttgtagaaacttttacaaagttatggattggagaaggtgtagaagcatatacgaaagaaaaacaatggttaccaattattttgcaaaatatctttactgatgcagttggatttgccggatgtgaactgattcgtagaacaattggtttagctcatgtagcagatttagatgaaatagaaaataaagaaacaagaattcaagctaagaaacaagcgctatccttaggtaaagaactaataaaatatgaatctaaaagtgctgatattcaactgtttcgaatattatttcaacagacagtttcagggggcgtaaaagcgtgagtacaattgttactgttccgagatctgtaagctggaaaggtgatgcaattgcggtattaaatcaaacgaaattgccgcatagcacagaatacaaaacattgacgactattgaagaggtttggaaaagcatcgtaatgttagaagtacgaggagcgcctgcaattggaattgtagctgcatttggcttggcgcttgcatcaaaaaaatataacactgtacatattgaagaatttcaaaagaagtttaatagagattgtaattatttaggaacgtcacgcccgacagcagtaaatttattttgggcaattgatcgtatgagagaatctattcgagagattactacaataaaagaagcacaaaaaacattagaagaagaagcgcttcgcattcagcaggaagatgaagaggtgtgccgaaatattggggaatatgcgttaacatgttttaaagatggcgataatattttaacaatctgtaacgctggaagtatcgcaactgccagatatggaactgcattagctcccttttatattggaaaagagaaaggtgtgcgtttacatgcatatgcgtgtgaaacgagaccagttttacaaggtggtcgcttaacgacctgggaattgaagcaagcaaatattgatgtgaccccatgcccatcaacttaaggatagaaactctacggttttccattaattgaaatgaacaaacttttaaacagtataatcttttgaagaaaatttagccataaaaaatgcacctccaattgttagttatgtgtctaacaattggggtgcacttcatttatcggtggtcttttattgagaaaaaatatatatgcataaaagcatattttatcctacccattatcgtatacaatattaattgtaacaaaactgattacaactaataaggaggctttttctattatgaaaaaaatgattttagcaggtgcattaactttagcaggaattactggagctactgcgtttattcctgaaacaaaagtcgctgctgccgctcaagaacaaagctttacaaaattttattctttgcaaactggaggtagttctgaacaagaacctattttccttcaaaaaggacaagaactaacaattcatcctaacagcaaaactcctagttacagtgtttatgactcaaatcataacctaattggacgttattctgatggttacggccgaattttcactgcaaaaacagatggaaatatgtatgttcaatttcatgcaccttacgtttactatagtcctgttagtttttctgttacttatactattcaataaaaaagaggtcctttatagggccccttttatttctcttgccaattcacttttacaaatccatcttttactgttaatccgcttatattcaatacatattcttcatttgcttttaaagtaactgtaaaagtaccttttttcgattcacaaatttcctttaactcttttataccttctccttgtctttcatacacactaaaacataagtttcctcgttttgcatctgtctcataagaaaatgtcacttctgtatccttttcatactgaaattcaatatccttactggcaatatcccatgatgagaattttgcctcataacttgttttcccttgcttctcatttgctaaatatatatccccggctctccatgcatcatctaacgtttgtgcaaaagtaaaagcactaagtaatacaaacattgtgcttgccaatatcgcaactaatgttactttctgttttttaacaaaattcaccttacattctccttcaaccttctttttacttcttcttaccatatataataaaaacccaataaagaatggcaatataactgctaaaatactccatcctttgctcatttgatgtgctttagcatctgtatatacccatgatgcaacacatattaaaagtgctataaaagctaaaaacatcgtcactccagctacttcaaatagtacaaacggattagcgaactctttcatgtaatctatactccttctttaaaaatgactgtattacaacatatatcggaatgtatacatgcatcataatcacaatggctatcaacataggaattttataatccaaatgtgtgacaaattgttctataacaattgttaacaaaacaatccaaatggtgtgaatacaaatcatccatttcctctctaacttctgagcctttcgcacgccctgcttcgtgttatttattagctcttcgcttggagttatctcttctgctaagctactctttaccttctgttcaaatttatcttctgtcataaacgaacccctccaaatgttctcgcatttgcttcttcgcataattaaggcgatatttcactgtaccaatcggtatatttaatatttcgctcatttctttataagagtattgttcataatagtagagtacgagcacggttttatatttttcattcaatagctgtataacttcccgtatcatttccgcttccactttttgaataaattcttctgatatattcacatcatctgcgaaatctatttctccaccatcttctttatgaaataaatctaagacgcgatctttccatcttttcttcttgcggtaaaagtcataaaatgtacgaacgcaaattgtagtaatccactttttataattatccacataaaaaagttggtgccttgatgaaaaaacctttatccacgtctcttgaaaaatatcttccgcatcttctttcgttttcgctaacttatagcataaggaatatatttgctgcttatatatatcaattaattcttctatcttttcttccatcataagcctcctgtcatttatataagacgacgcaaattccccttttgtttgataaattttttttattatctccacataaaaaggcaatcacaacatcgtgtgattgccttttatttaaaaacgaaagtccgcttccgcttttctttatgtccagctctgcctcctagccccttctgtctaagaaccttccccacgagaagataaaatgcatcttctgtgggaaagaaccttagccttcgggactaaacagtcggctccgcttttctttattgtccagttccagcggctagaatactcggtggcttcgcgccttcctccgaggcaaagtacacctctctgtcaggagctccatccccctcctattctaaacgagccgcttccgcttttcttcattacattttttctggtgcagatactcctacgattgctaatgcattttgaagtgtagtgcgtactgctttcattaactcataacgagctttacttaattctaagttatcttggtttaatactttttctgcattgtagaagctgtgtaatgttgctgctaattcaaatgcatagtttgtaatacggtgtggtagacgtttttgtgctgcatccgcaactaccgctgggaattcaccaagttttttcagtaactctacttctttctcagaagtaacaagtttatagttcacatctccatctacagctaatcctaattcttcgccttgacgaaggatactgcatacgcgagcatgagcatattgtgcatagtatactgggttttcattagattttgatacagctaagtccatatcgaagtctaaatgagaatcaccgctacgcattgcgaagaagtaacgcattgcgtccacgcctacttcttccataagctcacgaagtgtaactgctttacccgtacgcttactcatcttcattttttcaccattttggtatagttgtaccatttggatgatttctacttcaagcgtgtctttatcgtaaccaagtgcttgaatagcagccttcatacgaggaatgtaaccgtggtggtcagcaccccaaatgttgattaacttatcaaaaccacgctctaatttatcacggtgatacgcgatatctggcgttaagtatgtgtaagaaccgtcgtttttaattaatacacgatttttgtcatcgccgtaagtcattgaacggaaccaagttgcgccgtcttcttcaaagatctcttcacgctcttttaatacagcaagagcttgatcgatttttccgtttttgtatagtgatgtttctgagaaccatacatcaaatttaacgcggaagctttctaagtctttttgaagttttgctaattcatattttaaaccgtactcacggtagaattcatagctttctttttcatcagctttcgcataacgatcgccgaattcttctgctaaacgtttaccaattccaatgatatccgcaccatggtaaccgtcttctggcatttctttatctaagcctaaagcttgcatgtaacgagcttcaacagaaagagctaagttatgaatttggttaccagcatcattaatgtagtactcacgagatacatcgtagcctgcttttgctaataggttacataaagtgtcacctactgccgcaccacgtgcatgtcctaagtgaaggtcacctgttggattagcagatacgaactcaacttgtactttttcacctttaccagtattcgtttcaccgtaagcttcaccagcgtttacgattgttggaattaaatctgttaagtagctattatccatatagaagttaataaaaccaggaccagcgatttcgattttttcaatagaagcttttgctttatcgaagtttgcaactagttcttctgcaatcatacgaggtgcttttttcgcaacgcgtgcaagttgcattgccatatttgtagagaagtcaccatttgttttatcttttggagattctaatacaacgtttggaatctgttcttctgtcgctaattctgcctttaatacagcagcctgaatttcttctttaatcaatccttttacttgttctaaggaattcattattttgcctccttcaaattaattgtaatagtatatctgccagcttcttgttcacttagaagcaatgcgtaagttaagaagagttgtccttttttcttttcatccgaccatttaaaaagaacgttatcagtctttgtttgcaatgcaaacgtaccaagttcactcgtatacgtaccagttgtccattcacctttcacatgcgtctgacgcatagaaacagcacctgaacgcataatgagaacttgttcatcttgaattttaataattgttttcacttcgccttgttcgttcggctcctggaatgttacatatgtaccttgaccttttacatagtattgaccatttgcttcaaaagcaacggtttccttcctcgccccttcacggatttctgttacgaaatgaacgtgtaccggcaagcctgcaagttgtttctccacgtcttgcacacctttcaaatgttatagatattaaatactacttataataaatcacttttcctatcatatcaaaaaaagactctgtctgtctgctgaaaaatcaggaaaactccatttcaaaaaataattcacttctactttatttcatacgataaaatattttttaaatctaaatattctttcaattaaagaggtgaatatagtgataccaacaaagttaaaaaagggtgatgaaatacgagtgatttcaccatcgtgtagtttaagtattgtttcaaatgaaaatagaaaacttgctataaagagattaaccgacatgggctttcaagttacattctcaaaatatgccgatgagatagatcgatttgcttcctcttctatttcttcccgcattcaagacctccataaagcatttggagaccctaatgtaaaagctattttgacgacacttggcggatacaactccaatggtttattgaaacatctcgattatgatctaattcataaaaacccgaaatttttctgtggttattcagatattactgctttaaataatgcaatttacgcaaaaacaggtctcgttacatattcaggaccccatttctcttcctttggaatggagaaagggctcgagtatacaaccgattactttttaaagtgcttaacttctaatgagcctattgaagtcctgccatctgaaacatggagcgatgattcttggtatatagatcaggaaaatcgagaatttattaaaaatgaaggatacgtttcaattcaggaaggagaagctacgggagatattatcggtggcaatatgagcacatttaacttactgcaaggcacaccatatatgccaaatttaaaggacaaaattttatttattgaagaagatagtttaactggaacatctactcttaaaacttttgatcgttatttacattcccttatgcagcagcaagattttgaatacataaagggaatcattataggaaagatgcaaaaaggtgcagaatgtacgatagaagacattcaagaaatgattgcttcaaaacctgaacttgcacatattcctatcattgcaaacgcaagtttcgggcatacaaccccgattttcactttcccaattggtggacgtgcaaaaattatttctaacaaggaaaaaacatctatcactattttaacgcactaaaaaggagcgaatgagtcgctccttttatggtttttctattttttccaacgctttttgtggaatagattctttcgggatttcagcccatccttttccttgcataccttttgcataaatttttataaacgcccccgtatgcaattcacggttcatcattcttttaatgatctgtaactttccgtcttctgtataccctttaaaagtatacaagtattctccgtcttttttctcacctttatctataaccgcataataatcttgtatttctttatttgaaaagaagttgtctacaaaagcatgtacaccttctgtttttgtgttcaaataatacgctgttccacctagaataatggcgaatatagctaaaactttaattaccaatttcatacatgaacctcctgtttgcacttctttctcactagtattatatctatacttgtattatacggaaaagagcatactatactctatctaaaagtcttacactttccttacattattgtaagggattttttcttacagcaagttcccaagaaaaaatttttccgtttcatacacttttatattattattgaatgatacgaatttttattacaaaaatcaaaggagacagttttcaaatggctatcttgcaaggtttagcactattacttgttgtactttgtctatttacactttttagttaccgtgcgccttatggaatgaaggcgatgggtgctttagctaatgcagcaatcgcaagttttcttattgaagcatttcaccgttatataggtggagaaatgtttcataatgactttttacaatcagtaggagaagcttccggtagtatgagcggtgtcgcagcagcgattttagtcgcattagcaatcggtgtttcccccgtatacgctgttttaattggtattgctactagtggattcggtattttaccaggatttttcgctggatacgtttgtgctttcgtcgtgaaatttctcgaaaagaaattaccagctggcgtggaatttttagcaatcctatttatcgctgcaccaatctcacgcggaatggcaatgcttatggatccgcttgttaacgcaacactcggtaaaatcggttctatgatttcagttgcaactacagaaagtcctatcattatgggtattatgcttggtggattaataacagttatttctacctctccactaagttctatggcactaactgcaatgcttggattaacaggtttaccaatggcgattggtagtcttgccgttgccgcctcagccccgatgaactttattttctttaaacgattaaaaatttgttcaaagaaagatacaattgctgtagcaatcgagcctttaacacaagccgatattgtctcagcaaatccaattcctatctatatgacaaatttcgttggcggtgcacttgccggtattattacatcgctattccaacttgttaataatgcaccaggaacagcatcaccaatcccaggacttcttgtcctattcggatttaatgacgttgtaaaagtaacaattgctgctatattatgtggaatcgttaccactattgtcggatacatcggatctattgtgttccgtaaatatccaatccgctctgctgatgaaattcgcggagttacttcggaagagaaggttgcataagaaaaagagctattcccatcgtttgagaatagcttttttttgtgttgcgtaacggtaaatgaaattatatcggcggtttttttaatatatcagcgcaactcgaattatatcggcgatttttttaatatatcggcgcaactcgaattatatcagcgatttttttaatatatcgacttaccgacacataacgacaaaataagagccctctaatcatatagagggctcttactttatctagctgcagcggctagaatgatcggtggcttcgcttcttccttcgaggcaaaaagcgcctctacgtctgaaactccatccccctcacattctgagcgagccgcttccgcttttatttcacccaaccgagcagcatttcccgcacgaatttgcttgctgcgactggtgtttgatcactatggtcgtagactggagctacttctactaagtctgctccaactacatttatatttgaatttgcaattgctacgatggaatctaataattctttagatgtgataccgccagcttctaatgttcctgttcctggagcgtgagctgggtctaatacatcaatgtcgattgtgacatagactgggcggccagcaagtttcggtaatacttcttttaacggttctaatacgtcaaatttgtataagttcatacctacttctttcgcccattcaaattcttccttcattccagaacgaattccgaaagaatatacgttttccggaccaattaaatcacacactttacgaattggtgtagagtgggataaaggctccccttcatacgattcacgtaaatcagtatgagcatccatgtggatgattgctaaatccggatatttttttgccattgccttaaaaattggccaagacactaggtgctcaccgccgagacctagtggaaacttatcggcatctaaaagttttgatacatactcttcaatcatgtctaagctgcgttgtgcatttccgaatggtaatgggatatcacccgcatcaaaatattttacctcttctagttcacgatctaaatacgggctatattcttcaagaccgattgatacttcacgaatacgtgcagggccaaaacgagatcccggacggtaacttactgtccaatccataggcatcccataaataactacctttgactcttcaaaacttggatgacttttaataaatactttacctgaataagcttcatcaaaacgcatattcttttcctccttatgtggaacttaaggtatcccaacctttcactatttctcaaatttggagcgaattgctcctctttctcgatttaccgggtcttctttttaacaacaagaagacgattttctctacagaagtgtaagtagctagcatgttcaagtcttctggacaaacaccttaaatgagctacttacactttatttgtttgatacaattctcttacttaattaaatccccaacaaatttcggtaatgcgaatgctgcattgtgtaattcttttgtgtagtatttcgtttcgatttcgtggaaacgctcttcacttacttctaatggatcatgttttttagatccaattgtgaacgtccaaagaccacttgggtaagttggaatgtttgctgtgtacaaacgagtaattgggaagatctcttttacgtctttaaacacagttgtaattagttctggtgtaaaccaagggttgtccgtttgtgcaacgaaaataccatcttcttttaacgcttttgaaattccagcgtagaagccttttgtaaataggtttactgctggtcctactggctcagtagaatctaccataattacatcgtattcattttcgctttctgcgatatgtaggaaaccgtctcctacttttacttctacacgctcattatctaatgcgcctgcaattgatggtaagtattgtttagagtactcaattacttttccatcgatttcaacaagagttgctttctttacacttgggtgttttaacacttcacgaataacaccaccatcaccgccaccaacaactaatacgttttcagggtttggatgtgtaaataaaggtacgtgtgctaccatttcgtgataaacgaactcatctttttctgttgtcataaccatgccatctaaaataagcatgtttccgaactcttccgtttcgaccatatcaagtttttggaattctgtttgctccgtatgtaatgtgcggttaatacgcgccgtaatcccaaaatgttttgtttgtttttcagtgaaccatagttccatcgtacaatcacgcctttcaatgcaaatttataatagggacatcattaatgtcccctaacaaaaataaaacaaaacatccaaaatgtatagttaaaagtacaaaaataccgaaaatatattttagtcagagggttctaacatatgtgcggaaagggtttgcaccgcaaaaggaaagaaaaccctttcttaagaaagggcttttgtctctatttctactggtttacgaattggaattaggatcataatacaaccaactaacacaacaattccacctactaaaaacggactttgtggtgaaacagtatgaccgataattcctgataaaattggagcaatcgcaccacctaaccaacgaacaaagttataaacacctgacgtaacagatctttcataaggtgaaatatccattacataacttgtatataatgcattgtttaagccagatgccaatcctgataaaacgataagagtaatttgtaaccacataattttcacaaagaatagtgcaattaagaaaatcgcaaatacgagtaaactaccctttaataatgtttttggttcatatttcccttctagcttatgtgctaaaattgcagaaccgtaagctaacgcaagcccccatccgcaaaatacaaagcctaattgaatagctgataaatgcataataagtggtgaatatgctaacacaacgaaaaatccgtagtagtataacattcctgaaatcgcaccttgcataaacggtttatacttcaccaggttaagtaattctcctaccccagcagccttacgcttcacttttcgctccggttcttttacaaaaaagaatactaaaataaatgctaagaagattaaaatactcgtcgcaaaaaatgggtaacgccaagaatgtccacctaatatcccgcctaataacggtccgcctgccatccctaaaccgatagctgcttcatacaatcctactgcttcatgaacttctttacttaatgcaatcaataatgtcatcgccgttgcgaagaacatcgcatttcctaatccccatcctgcgcggaaaagagataattgagcaatcgtttgcgatataccgcatataaacgcaaatacagtcacgatcgcaagaccaatcgtcatcattcgtttatcaccaaatctcgatgcgaatattccagctggtaacatcatgattgccatcgttaaaatataagcggtaaataacatttcaacttgccaatgcgttgcaccgattttctcagcaataattggcaaaattgggtcaactacccctatacccgaaaaggcaaggaaggtagccaccactgtaatcaatctccctagtttttgtttgctctccattttgattactctccttttgtgttctctaaaaatgttactgcacgatgtaaactatcttctagttctgcctttacacgttgcatttgctccattttttcgtctagcgtttccacttgtttttcaagcatatctttaatttcttgaatcacttcacgatcacgagggttttcgctatttcttctttgctccattctttcttttaacgataaaaaatgctgcatctcttgaagcgtaattcctaacacttctttcgcttccacaatttttttaattctggcgatatccccgtctgtatacaggcgaatgttcccctcactacgttcagggggatgaattaaaccaatttcctcataataacgaagtgtacgttttgtcaaaccaacttgctttgttacttcatcaattttatacatgtttattcctcccttcacttgattattacattttacgttaacgttaacttttgtgcaactgttagacttttgtaaatgtttgtcatattcaattgtattttccctaaagcagtttcataatgaaagaaaagagataataaggagaatttcacatgagtaaaccacttattttcgctcaccgcggagtaaaaggaacacatcccgaaaatacgatgattgccttccaagaagcagaacgcattggcgctcacggaattgaactcgatgtccacttatcaaaagatggtgaacttgtcgtaattcacgatgaaaccgtcgatcgtacaacaaatggcgttggacttgtttcggaaaaaacggtagaggaactacaatcattggacgctggtagctataaagacccttctttccatgaagcaaaaatcccaacgttgcgtgaggttttcatttggctttccacaacgaacttacaactaaatattgaattaaagacagatgttattcattacccaaagattgaggaaaaagctgttgcacttgtgcgtgaatatcatctttctaatcaaattgtattttcatcatttaaccatgactctgtttcattattagcagaaattgctcctgaaatcccaagagcaattttatatgatacaccactttctgatccaattgccgaagcaaaacatagagaagcaaatggattacatccaaacttccagttattaacgaaagaatttgtgcagttagcacaagagcaagggtatgttttccgtccatatacaattaatgaatacaaagatttacaaactatgattgattatggtgtagatgtcatcattactgattggccagcacgtgcctttgagctcctttcttaatggaaggggcttttttattttcgaaatttcattgtttaaaataaatgaaaaccctcaatactaatacaataacgcttgtattaatgaggggctgaaaaaagatggatcaaactatgaatccaaaacttaaaaaatataaacgtcttttcttcaccgcaatgttttcttgcgtccttttcttcgttttttctttttttgttattattatagttgcaaaaattatgggacctcctcctgttgcggtcccgcaaacaagcgtcttttacgcaaatgatgacactgttataggacaaagtaatgaaatgcaaaaacgttacaatgtatctcttaatgaaatttcaccttatgtaaaagaggcgacactatctattgaagatcaacgattctacaaacatcatggctttgatatgaaacgtattgctggtgccattgttgccgatttaaaagcgatggcaaaagtccaaggtgctagtacgattacacaacagtatgctcgtaacctttacttagatcatgataaaacgtggaaacgtaaactattagaagcaatgtacacaattcgccttgaggtgaattataataaaaatcatattttagaaggatatttaaatacaatttattacggacatggcgcttatggcatcgaagctgcatcccgtctatatttcgataaaacggcaaaagagttaacattagcagaagctagtatgctcgcaggtatcccgaaagggccaagtgtctattctccctttttgaaagaggatcgtgcgaaaggacgacaagctctcatattagatgaaatggtagaacaaggatatattacgaagcaacaagcagccttagcgaagaaagagccactaacttttgcctcattagatacgaaaaaagtagcagaggtcgcaccatatttccaagatgctgtacaagcttcgctccttcgtgatgttggattagacgaacaagctttacaacggggtggcttgcgaatttatacaacgctagaccctaaactacaagctgtagcagaacaagctgtaaaagatcacatacctgacacaacaaacatacaaactgctctcgtctctatgaatccaaagacaggtgaagtggctgctcttgttggtggaactgattatactacgagtcaatttaacagggctacacaagccattcgtcagcctggttctacatttaagccatttctatattatgcggcattagaacgaggattcacgcctgctacgcgcttaaaaagcgaatatactgtattcactttaggtgacggcgtttcaaagtataaaccgaagaactataaagattattatgcagatgatttcgtaacaatggcacaagctctcgcagtctctgataacatttatgctgtgaaaacgaatttgtttttaggcgatgacgcgcttgcaaaaacagcgaaacaatttggaattaaaagtgcattaaaagatgtgccttctctagctcttggtacatcaccagtaaaaccaattgaaatggttaacgcttatagcatgttcgcaaatggtggaaaagaagtaaaacctactttcattcgccgcattatggatcatgaaggaaatatattatacgatgctcatttagagagtaaacaagttctcgacaagagcaaagcgtttgtaatggaagaaatgatgactggtatgtttaataagaaactaagcagctatgctgctgtaactggtcaatcgatgttatccaaactatcaagaacatatgccggcaaatctggttctactgaaacggatagttggatgatcggatttactccgcaaatcgtaactggtgtgtgggtcggatatgatcaacctaaatctatttcaaacgtagcagaacaaggatatgcgaagaaaatatggactgatacgatggagaaagggttagagggacaaccaaaaaaagaatttaaacaaccaagtgacgtcgtagcggttaatatcaatccagagaacggtaaaattgctacaaaaaattgtcctatttctgtgaaaatgtatttcgctaaaggtaccgaaccgactgaatattgtatggatcacgtcgatgataaagaagaatttgaaaaaacgactgaagaaaagaaaaaaacaagttggtggaaaaaatatcttccttggtaaaaaaatagctgacgggcatccgtcagctatttttattcacttaataatgcacggcgtaattcttcactagattcgttccaaatcgcttcattatgttctttcaagaacgtaccaagtacctttttagatgattcatccatatggtcaaccataatgtgacgcttcaatgatttatccattttatttacgtgctctggaagtgatttatatccgcggcgaatctcacggtcaactgtcatttcacaagctgttacacctgcataatacgcacctgtcgcagttctttcaattgttacccaaacaagccaaaatggttttccgtttggaacttcatctttatttgttaaaaacttaatacctttttctactgtactacgcgcgtgcatcgcaccaatatcaacgaatgcagttttctctagtacatcaacaaatacaggtgaaatgttttctaagcttaatgccccaacaccaaatccaccatgtccatctgttgaatcatttttcacgatattaaaaccgatttttttctttttctctgtcatatgtaaaatcctcctcacttaaaaattataaaaggccaaaaataggcgcaataatgctatctaaaaatacaaatacatgcggaataactacctggaaaataggttgaattgtgtaattactaagcggtgtaataacgagaattaataacgcaattgccccgtatttttcatactgtgtcattttcgcgcgaatatttgctggcgctaaatcttccacaactcgatacccatcaagtggcgggatcggtaataagttaaatacaagtaaaacgatattcagcataataaaaatctggaaaaattgagctaacgtatctgctactgcagatggaattgagtataatacaccaaattttactaagctataccaaataattaaaccaattgcgcttaaaattaagttactaatcggccctgcaattgaaactaatatacctgcaagacgcggtcttttaaagttatatgggttaacaggaaccggtcttgcccaaccgaatccaagaattaatactgcaatcaaacctataggatctaagtgtgccatcggtgataacgttaaacggccttgtctctttgctgtatcgtctccaaatttatatgctacatatgcatgtgcaaattcatgaactgataatgcgataataatggccattgctaccaaaggaatttggtgcaacgggtatctaaataactgatccatgcttcatctcctcttccatatgtcaaaaaaagaaattatttgttttttcgattgttcttccccataatccgctataataagagtgtaacttacataaaaggagcgattgtacatgccatacgtaacagtgaaaatgctagaaggacgcacagaagaacaaaagaaagctcttgctgagaaagtaacagcagcagtaagcgaaacaactggtgctcctgaagaaaacatcgttgttttcatcgaagaaatgtctaaaaaccattatgcagttggcggaaaacgcttaagtgacaaataatttcaagttttttcataagaagcagccattagctgcttcttatttctttccttctaacaactcaataattctctctttatattttccttttcttccatcttcatagattaaatcatgtggatagaatagcttttgatccgttcttttcttacctgtaatcgcctcaacaatgtccgactcacgtgaaagctctctaagctctccgtttggcataagaagtaggattggtagacgctcttcttcttctcctgcacgataaaagtcatacggtaagtctgatgttgaatcaactactaaataatactccggatcaagtccaatctttttaaataaactacttaattccatccaattatctaaaccgtgtttatctgtaaactctacatatttaaatagatttcgattcataaaacggcggcataaatcgcttaaaattgaatcttcttcttcctgccatacttggaagtagtaatacataacgttctcgtctaactttaaataatcctctactgttacttcttcttcaaataaagaatagaaatgaacaggatgatttttaaatgtataatacttctcgtgcagtgatttcgcacggtgtaaaatcttcgttaaaataacttctgcacttcgcgttaccgggtggaaatatacttgccaatacatttgataacgactcataatgtaatgctcaacagcatgcataccactatttttaatgactacttgattcccatacggacgcattacacgcagtatacgttccatatcgaagtttccgtactttacgcctgtaaaataagcatctcttaataaataatccatacgatccgcatcaatttggctcgaaatcatactaatcgctaatttattagtagatgtttttgcaattacatctgctaccttttgcggaaactccttatcaacacgacttaatacatcattaatctccgtatcgcctacgataatcttttgcgtaaatttctcatgatctaatgaaaatactttttcaaacgagtgagaaaatgggccgtgaccgacatcatgaagtaatgccgcacataaacataacaatctatcttcagcattccaatttggtctgccatcaaacacatcatcaatcatacgacgaataatttcgtatacacctaacgaatgagtaaagcgactatgctctgcaccgtgaaatgtaaaaaatgtcgttccaagctgcttaatacggcgcaagcgttgaaattctttcgttccgattaaatcccaaataacacgatcacgcacgtgcacatatttatgtactgggtctttaaacacttttgtttcgctgagtttgtcgtttaaatataccactttccgacatccccctttctttactacattcttactttatattataaacgaaatgagaaacagaaagaaatgaaagactgtattaattccctttataaaaagaaaaaatcacctttaccgaagtaaaagtgatttcctttatacattatttacctaaaacgaattcagcaacttcgtctaagatcatatctttccctagtgggaagtaacctttgtttaagtcttcatttttaattgtaaatacgtggttatttttaacagcgttcatgtttttccaaattgattcttcttggaattcttttaagcgctgagaaccgtcaccagttgtaaatacgaataagtaatctgggttgtaatcgattaaagcttctttttgtacttgtactaacggtttatcagttggtgtacctttaactgctggtagttttaaatcattaaagattacgctaccgtaaccgtaatcaccatatacgcggaaagcatttggatatgcagccattttcataaatgttgcttcaccagttttagcgacgattttgtcatgtaatttgcttgctttttcatcatactttttgaaccattcttttgtttctttttctttaccgaagatttgacctacttcttcgaattttggacgccattgatctaatggagtgtttaacataactgttggtgcaattttagataattgatcataaatcttttcttgacgattatttacaagaattaaatctggttttgcaacagctactgcttcaatgttaattttatcgccccaagcagaaccaactggtttaacgtcttttagtttcttttcaatatgtgcatcaattttttcttgagatgtattagcagtaataaccggtttcataccgaaaattaataattcttctgttgaaccactaaggtcagcaattttctttgggtttgcaggaattttaatttccccttttgcatgttttacagtgcgctcttcagtctttgcatctgctttcttttcttcttctttattagaacaagctgcaaatagtacagaagtcacaactagtaccattgctaatagtgccattttaaaattcttcatgttcccactccttctagctgtatttatcttataagttacaatgaactataagaaacgaatataacaattaattaatatatatttattaattgttgttaataacccattctaacgggcgttcaacttcccattcatatataagaagctcaacgtccattagaagcccccctctttacgagggggttctacttatgcttttttacgcaattgattactaatcatcgctaaatcatatgttaaacaaattggcttacagtttactggacatggaacgatttgagcttcaatctcaaatacgttacgaagtgtttcacttgtcataacttcatctggcgttccttgtttcattaacttacctgcttttaatgcaatcatatgatcagagaaacgagaagcgtggtttaagtcatggataaccataacaatcgttctaccttcttcttcatttaactttttcaataagtttaatacttctaattgatgagccatatctaagtacgttgttggttcatccaatacaagtaattctgttccttgtgcaagagccattgcaatccaaacacgttgacgttggccacctgatagcgcttctgctggacgattcgcaaattctttcattcctgtcacttcaagtgcccagttaatgtagcgataatcctcttctttcaacgtgccaaaccctttttgatgagggaatcttccatatgacacaagctcaaatacagtaagacccgttggcacttctgcagtttgtggtaaaatcgccattttctttgcaatttctttcgttggctgtttctcaattgcttttccgtcaagataaacagtaccttgctttgccttcaaaatacgagacgccgtttttaataatgtggacttcccacaaccatttggtccaataattgttgtaattttcccttccggaatttcaactgttaaaccatcaataattaaaccttcattatagccaacagataccgcatccaccgctaaagttgccatacgaaaagcctccctttattttgtcctcataagtaaataaatgaaatatggtgcaccaattacagaaataacaagaccgactggtatttctgaagttgttaatacacttcttgaaattacgtctgcgaataaaagtaaaaacgttcctattagcgcagcggtgggcaacataatttgatgtttaccaccaacaaggcgccttgctaaatgcggggccattaaaccgataaagccaattccaccggcaacagcaacagatgcacctgctaaacaaactgcaataaataataatttacgtctttctttttctacgtttacaccaaggccaactgctgtagaatcgcctaggttcattacatttaatatgtgtgctttacttatagcaagcggtaagaaaataaccatccatggaagtacacttaatacgaatttccaatctgtaccccatagacttcccgccagccaaatcgtagcaaaacgaaaatcgttagatgtcatcttcatagagaaaattaaactaacagctccaaatccagctgcaacggcaataccaacaagtattaatcgagtcgatgaaacgccgtctttccatgctagtaaataaataattaccgctgctaatatcgctccaactagtgcgaagaatggaagaatgaatacagataaaaatgtaccagtccctactttcccgaagaagaagtagacgaatataacaactgttaatcccgctccagcattaatacctataatacctggatcagcaagcggatttcgtgataaaccttgcaaaatcgcacctgacatagctaaagcagatccgactagtatagcaattaccatacgcggcatgcggaattcaaataaaataacagactgatcttcagcccctagtccaaccaatgactttaatacgtccattggcgggattttaaaagttcctgtatttaaactaataagaaatatagaaacgattagtcctactaaaatcgttaatatagaaatgttcttttttgttaagacactcgtcctcacatctttcctctcccttcattacgtgctaagtagaggaagaatggaaccccaattagcgctgtaattgctccaattggcgtttcaaatggcgggttaataacgcgagataacatatctgcacattcaattaacagcccgcctaagaccgcagaacatggaataacccatctatagtccgagcctacaagaaaacgagtcatatgcggaattacaagaccaacaaatccaactgatcctgccatggaaactgcggaacccgttaaaacaagaacaagtactgttccgataaatttaattaatgtcgtattttgaccaagtccaattgcaatttcttcaccgaagctcaaaattgtaatatatctcgacatcataattgcgataaaaagacaaacaaggccaattggcactaacatattaatactttgccatttcactccagcaactccgcctgcattccacatgcttacctcttgggcaagattgaaatacaatgcgattccagatgaaatcgcccctaataaagcactaatagctgcacctgctaaagctaatttcacaggtgttaatccacctggtgaagaagacccaattccatatacaatgcttgcaccaaacgcagctccaataaaagatgcgataacaaacattaaataaggtgaattaggaaaaaatgcatacataattgcaattccaaatacagccccatctgtaatccccattaacgatggcgaagcaagtggatttcgcgtcataccttgcataattgctcctgataccgctaaaaaggcacctgcaactacgccccctattgctctaggcatgcgaagctcttgaattacattatgatgtgtaatagatccatcaaaccgaaatacagcttgccatacagtctttaaactaatatctgcagccccaaaagaaatagaaactgccatgcttaaagctaacaaaactgtacccgctactaaaataatagaagcgataagcggtctgctcttaatctctttaacattctcttcttgctgttctatactgcttgcgctcgcttccatccctcaaccatcctaactaacaacatatatttattgaaatgaaatttattctcaaatagtaataaaaaaattaggtgaattgttattttcctgataatgattctcagaatcagacacttctattctacctatcgctttaaaagactgtcaaccattattttgaaatataaatttatacaaattggaattttaatacaaaagttgtgtctatcctttagaaaacgttcgtccatacaagagtactttcgcagaataaattattcctcttatgggcataaaaaagaagagtaatcttttcactcttctttttcttacttatttaactttgcttcaatttttgcgattaactcatcttctgttggagccgcaactggacggttatttacaaatgcgaatgattttttacgaccaggaccacagtaagactgacatccaacttcaatcgttgcacatgaatctactttttttaacttcggaactaacgttttaacgttcgttgcctgacagtcatcgcacacgcgaaactcgtttcccattatataacacttcctctattttaaacttttctcaagtacgtttaaaaataaacactaaatggtattttaccgctctttgaagctcgttgcaagtttccctacaaagcctattctctacataatgctacatatttatatgctctcctacagaagcgctcaccattcatgggaaaatttttacctttcatcgaaatctaccatatttttaaaagctttgtataaaagtttatttttttgcccattataaaaataggaagttcataaaaagaaagggagttgaatctatgaaagtaagacaagatgcttggacagatgaggatgatttattacttgctgaaacggtacttcgtcatgttagagaaggaagtacgcaattaaatgcatttgaggaagtaggggatcagttaaatcgtacatctgctgcttgtggtttccgctggaatgctgttgttcgctatagctatgaacaagctcttcaactagcaaaaaaacatcgtaaagataaaatgcgtgctgcaagcggtgaacaagcgaaaaaacgtttactttatacaccaccagcttcagattcgataactgattatgaagaattagtacaagaagaatcaatcgtacaatataaagaagctattccatatcaagaatctactgctcctgctgcaagaagctctatgacaatgcaagatgttatttattttttacaaacagtcggatcttcaaatataaaagtgacagctcttgaaaacgagaatacgagattgaaacaagaaattaaagcacaaatccttcggaatgaggaactagaaaagaaactagaaaaattagaaaagcaatctcatactgtacaagaagattacgaaacacttatgaacattatgaaccgagctcgtaaattggcagtcatggatgacgaagaacgttctcaaacatctttccgaatggaccgaaacggtaatttagaaaaaattgcagaataaaaaggatgcatgtaatgcatcctttttattatttcacctctaagctccccctttatatgtgagaaaactccatccttcattttttgctataatagagattgtcattttaaagataaggggttagttatatgagcaattcccgttccattttatctcagccagagtggcgcattgtagatcaatccagtttgggaccaacattccatgcacttcagtcattcgcaatggatgacacattatgcacaagcattggaaatggcaagtcagccgcaacaatgcgttcttgggttcatcacaatacaattgtccttggcattcaagattcacgccttccgcatttagaagaaggtatttcttttttaaaacaaaacaacttcaatgttattgtccgtaattctggcgggcttgcggtcgtgcttgatgaaggtgttttaaacgtatcacttttattccaagaaacagaaaaaggtatcgatattgaccttggatacgatacaatgtggcatttgattaaggagatgttaaaggattacgacgttactatcgaggcaaaagaaattgtcggctcttactgtcctggtagttatgacttaagtattcgcgatcaaaaatttgctggtatttcacaacgtcgtattcgcggaggtgtcgctgtccaaatctatctctgcgctaccggaagtggctctgagcgtgccgcactcgttcgtgatttctacaacctagcaattcaaggggaagaaacacgctttacgtaccctgaaattgtaccaagtacgatggcctcactctcagaattacttggtgaaaccattacagtacaagatttaatgatgcgtcttttaaaaacattgcagcaattcgctccaaagttaacaccatctcaattaacaatagatgagattcctttatatgagatgaatttacaacgtattattgatcgtaataataaagcacttggtttagaaaaataaagaccgtcgctataatagcgacggtctttatttcaattcattatagaattaaagtgcttgagctgctgtaattaatgctaacttgtacacttcttcttcgttacatccacgagataggtcatttacaggcatgtttaagccttgcaagattggtcctactgcttcgaagttacctaaacgttgagcgattttgtagccgatattaccagcttctaagcttgggaatacgaatacgttagcatcacctttaattgtagaacctggagcttttttctcagctacagatggtacgaatgcagcatcgaattggaattctccatctaaagttaactcaggagccatttcttttgcaatgcgagttgcttctacaactttttctgtttctggagatttcgcagaaccttttgtagagaagcttaacatagcaacgcgtggatcaatgccgaataactcagcagttttcgcactttcgataccgatttcagctaaatcttggctgtttggtgcaatgttaattgcgcaatcagcgaatacatatttctcttcttcacgtaccatgatgaatacgccagaagtttttgtaacacctggttttgttttaataatttgaagtgctggacgaactgtatcagctgtagagtgagctgcaccacttactagaccgtgtgctttgcccatgtatacaagcattgtaccgaagtagttttcgtctttaaggattttgcgagcgtcttcttcagttgctttacctttacggcgttcaacgaaagatgctaccatcgcatccatttcttcgtatgtagctgggtcgtaaatatcaacgcctgctaatgttaaattcatgctagcagcttttgcgctaatttcttctctattaccaactaagattggttttactaactcttcttttgctaaacgctctgcagcgcctaaaattctttcatcagttccttcaggaagtacgatagaaatgccttttccttgaactttttcttttactgttgtaaataagttgctcacgaataaaccctcctacatatgttaaaaaaactctatctttaagaatactgcttttcttctatattttaaacttatagctcccaaaaaatagataaaataaaaatgattatattttcataaaattcagccgttaaattcaccttgcttaaacacttaaatgtgacaattttatgcgccaaggttttatatagatgattttaaaactatatatgctatagttaacgtgtaaaactatcattaactgaggtgaatagaatgagtgaagcaacaacaacgttagatggctggtattgtttacatgatttacgttctattgattgggctgcatggaaaacattatctagcgacgaacgcggacaagcagtgtctgaatttttaaatgtcgttgaaaaatggaacgaagtagctactgcgaaaaaaggtagtcacgcaatgtatacagttgttggccaaaaagctgatattatgcttatgattttacgtccaacaatggaagagttaaatgaaattgagacagaattgaataaaacaactttagctgaatatatggttcctgcatattcttacgtatctgttgttgaattaagcaactatcttccagctgatgaggatccataccaaaacccgcaaattttagctcgcttatatcctgaattgccgaaagcaaatcatatttgcttctatccaatggataagcgtcgccaaggtgatgacaactggtacatgcttcctatggaagagcgtaaaaaaatgatgtacagtcatagtaaaattggccgtcaatacgcaggtaaagtacgccaagtgatttcaggatctgttggattcgacgatttcgaatggggcgtaacattattcgctgacgatgttcttcaatttaaaaaacttatatatgaaatgcgcttcgatgaagtaagtgctcgttatggtgaatttggaacattcttcgttggaaacattttaccagacgaaaaagtagagaaatttttacacatataaatggtgaaaaggaacgaaattcgttcctttttttattcttctctatatttatcctcaaaaatctccttttttctgcacttttgaagaaaaaccgacattttttcaaatttattgtaaaattgtaacctttttatatataaagatatgctaaaatgatacgagctatatgctaaataacgatgcgaaggtgataatctatatgaaaaaaattttgtctattttactattgcttgtattgtcaatttcttccttaggagtaacaacatcccatgcggaagaaaaaatacatattgaggcagccgctgcacttttatttgatgcagatactggaaaaatacttcacgagcaaaatccagatgaattgctggctattgctagtatgtcgaaattaattgttgtttacgctgttttagaagcaattaaagaaggaaaaatcacatgggatacgaaagtaaatatttctgattacgcttatgaagtctctcgtaataatgaattctctaatgtaccgttcgaaaaaggacgtcaatatactgtaaaagaattatatcattctattgttatattctcagcaaatggatctagtatcgctttagcagaacttcttgcaggaagtgagaaaaacttcttaaatcttgcaaatgaacatgctaaaaagctaggattaaagaaatataaatttgtaaacgctactggcttaaataacgctgacttaaaaggaaaacatcctgagggtactgatccaaatgcagaaaactctatgtcagctcgtgatatgggtatgctttcaaaagcaatgattacaaagtatccagaaatgctagaggatacaaaacaaagatttagaaacttcccagacaatcacccaaaaccaattcgtatggaaaactggaattggatgttaccaggagcttctttcgcttatgaaggtaccgatggtttaaaaaccggaagttctgatacagctggatacggatttactattactgctaaacgtggtgatgtacgtcttatctcggttattattaaaacaaaatcaatggatgaacgtttcacagaatctcgtgaattaatcgaatatggatttaataactttgaaaaacaaaaactaaaagttaataagaacaatacaatctctgtagtaaaagggaaagaagaccaagtaactgttgcacccgaaaaagaaataacagtaattgcgaaaaaaggtagcaaagaaccttataaaattgggactgaattagataaatctcttgctgaagatggacatttagttgctcctattaagaaagatgccaaagtaggctcaattactttagaatcaactgataaatatggtttcttagacggtagtaaaagtatgaaagttactgcaaaaacgacagaggaagttgaaaaagcaaattggtttgtgttaacaatgcgctctattggtgatttcttctcaaacttatggtctaaagttttttaataaaaaagctggctcacgctagctttttttattttccactctcaatgtaaaacttcgtttggttgtcatatctgagcccttttcctcatacgtatgaactagtaattgttacacacttcatctagagataaacctctttccaaaaggtattccaaaaagagaggtgacacataatgggtgttattgcttataacgaagaagatgtaaagttgttggctagactgatgcgtgctgaagccgaaggagaagggcaacaaggaatgttaatggtcggaaacgttggggtaaatcgtgtccgcggaaattgtttagattttaaaagcattcgtaatttacgtcaaatggtttatcaaaaccccggcggttttgaagcaacgcaaaaaggatacttttatcaacgggcacgtgaacaagatattgccctagcgagacggaccattcaagggcaacgtttttggcctgccaactttgccttatggttctttagacctgaaggggcatgtccaccaacttggtataaccaacaaaactctggtcgctttaaaaagcactgcttcttccagccatctgctggagactgccctagcgtatattaaggaataaaaatgaggagggatttttgaatgacacagcaacaaaacccctattatggaacaggtttttatcaaccatctggaacttatgtacaaccgcaacaaatgaccgctgggcaacagcaacagcaacaacaagcaatgcagcaacaagctgcgcaagcgcaatatgcaatttctcaagggatgttacctctagaacaatcatatattgaaaatatccttcgtctaaacaaaggtaagcaagctacagttgtaatgacttatgagcgtggtagttctcttggtactcaatcttatacaggtattatcgaggcagctggtcgtgatcatattatcattagtgagcctgaatccggaaagcgttacttattactaatgatttacttagattatgtagaatttccagaaagaattacgtatttaccgggtcaacaagcaacttatgctccaagaccataaaaaagctggcaaatgccagcttttgttttttataatccttttacaactgcagtccctactagaatccacgccacaataaacgctacaccaccaagaggtgtaattggaccaaagaacttaatgcctgtcgtacttaatgcatacaaactacctgagaacataataattccagctaccattagccaaccagcagtagttaaaagtgatgattgaaccttatccatcaataaagcaactacgaatagtccacctgcatgaaacatttgatatgtaacgcctgttttccaaacttctaacatttttgcagaaattttattttctaaaccgtgtgctccaaaggcccctaacgcaacagatagccccgctgcaatacaacctagtaaaaagaaaattttcatcttaattccccttttttacctttatcataagcaatttttgcatataagccaaacgatttatcttctaaaaatcaaataaagaattaccgtttgcatcactttcttttatatatactggctccccagaaacaggtgcaattggttgcatagttgttactggttgtgatccaattacttgcgattgaattttcggttctctatatgtagatgtttcaacttgttcatctaataataagtcacataaagcacgcacaactaataaatgttcttttgacttttgtccttcactactttttgccttcgcaatttcattcgccattttatttaaaatcttgtcgctagatatttgcattccttatcacctcgtactttgtaattctttctcgaattgtaccaatttttctactgaaccaaatactattatcatatcacgttctttcaatttttcctgtcctgccggattatgtataatattaccatttcttgaaatcgctaatattgttacatcaaactgattccttacattactctctagtaacgatttaccaactaatattgaatcttttccaactagaatttcttcaatgacaaatgactgttctactccatacaacactgtatcaatataatgaacggttaatggatttgcaataccttttgcgatatgaatacccgccatactagatgggttaataaccttatttgcaccagcacgccttaatttctcttcagtttctggcttttcagatctcgccacaattttaatcgtatcgtttaaccctcttgctgttaatgtaataaatacattttcggcatcatttgcaacaatagcaactaaaccagctgcttttaaaattccggcattatgtaatacttgatcttccgttgcatctccatgtacaaataaaagcttttcctgctccaatatactttcatctttatcaacaacgacaaatggaatattcttttcttgcaattcatgtacaacttgaagccccactctaccgcaaccacatactataatatgatttttcaactgcgctatttgtttatccatcttcttcctccgtactgcatgaaataaattcccttcaataatcatagctgccactaccccaattgcatacgtaacaatacctacgccaacaggaataataagaagcgcaaatactttccccgcttgcgttacaggaacggcatctccgtatccaacagtcaatacagtaatcattgtcatccaaaatgcttgaaacaaactaatctcttcaatcgtcataaatcctatcgttcctagaattacaacaaaagtcatacatataactgctatccataattgcttacgtgcattcatactgtgtttcaactcttttctctacctacaatctttgccagtggaaataaaatacgtatatactagatacggaatctatgaaagaggttgatataatgaagacatttctttccgccttacaatgggcactatttattttagctggaagccttattgtaccaattagtgtcgcaactagttatggtcttaatggcgctgaagccatcgcatttgtacaaagaacattatttgttctaggttttgctggtctcttgcaagctatatttgggcataaacttcctattcaagaaggtcctgctggcctttggtggggaattttctccctttacgcaagtttaggtgtcgtactatttggatcaaataatgagacacttaaagttcttcaatatgctttcttattaagtggtattatttgtattattcttagcgtttttggacttattgataaactcgttcgctattttacaccgacagtcattggaacgtatttatttcttcttgtcgcgcagcttagtggctccttcttaaagggaatgtttggccttgatggaaaacatacagaagtacaacctaacgtatttattctttcactcattgttattttactatcctttttcatcatgaagctacctattattggacaatattccgttcttttcagtatcgtatgcggctggatattattcgcatgcttcggattatctaatccaataacaccagtgacagacataatccgttttccatccttatttgttttcggaatgcctcgtgttgaatggaacatggtaattacggtcattttcgttacgctcttacttctaacaaatatgttagcaagtattcgcgttgtacaaaaggttgtctctaaatatgaagaaaacgctgcatcagatcgttttaaacaagctggcattataacaggaatcaaccaattgctaggcggcctattttcagctattgggcctgtcgctatttctggatcagcaggttttattgcaacgactaatatttataaacgtctcccgtttatattaggatcaagctttattattgtcgttagtatatttccaaagattacttcattctttgcagcaatccctgttgcagttggttatgccgctatttatcctgtattcgcaagcatgattggcctcgcctttcgagaatacgaaactgtccaggataaagaacgattatttaaagtagccggtctttcaatctttacaggagtcggagttatgtttgttccagcaggagcatattccacacttccaccatttctagcatcgtttttaagtaatggtctcgttcttggatctgtaatggcaatcttgctagaaatactattttctcgttccacagcaaaacaaatatcttaaattggaaaacttccattattgcactctacctttagagttgttacgataaaatcaaactttaatcattggggttttattcatccccaatgattattaaccaatattatgagcaacacactcataataatttatctacttcttttcaaagaggtttgatgtcttactattattcctcaatctcttcatgaacatgtattttgatttcaattaaagaaaggaattttctatatgacttataaaatgattgttttagatttagatgatactttattacgtgatgaccatactatttcacctcgtacgaaagaagcgttaatgactgcacaagagcaaggcgtaaaggttgtacttgcttctggacgtccaacgttcggtatgcgcaatgtagcgaaagaacttcgtttagaagaatacggcagtttcattttatcttttaatggtgcaaaaattattaactgtaaaacaaacgaagaaatctttagtagtacactatctcctgaaatcgttcacaacctatttgaaattagtcaaactgaagatgtatggattcatacttatatgggcgatgatatcgtaacggaagaaaataatccttatactgaaattgagggcgatattactggtatgccaattgttgtagtagatgactttaaagctgcagttaaagagcccgtagtaaaagtattaatgaataaagaagctgaacgccttgttgaagttgaaaagaaactacaaaaacagctagaaggccaattaagcgtgatgcgttcgaaaccattcttcttagaatttactgaagctggtgttacaaaaggaacgagcttaaacaaactgatccaaaagcttggcattaagcgtgaagaagttatcgcaatgggcgatagctataacgaccaagcgatgattgaatttgctggtcttggcgttgcaatgggcaatgcacctgatgatattaaagaaattgcaaactacgtaacagatacaaatatgaacgatggtgttgcaaaagttgtagagaaattcgttttaaaaacggatgtacttgtttaatattttcattcacaaaacctatttgaagtcaaatacttcaaataggtttttatttaaattctcatgcttttgtgactatattttgaactttgcactattctcgtagtgtaaactttctttttgtatataatgaaacaaaatagactattttattttgaaaaagaatacaaatttactatatacaagcatacgttaaaggaggctactttatgttatctacaccaatcggacgattaagagcaattggactagttgagggtatttctttcctattactattatttgtagcaatgccattgaaatatttcgcaggatttgcaacagctgttaaaattacaggcatggctcatggtgttctatttattctattcatctttgcagtaattcaagtaacaatcgtacaccgtaaatcaattttatgggcacttggagcatttgtttcatcagttatcccatttggcacttttgtactagatgcaaaattaaagaacgagcaacaataataataaaaaggtagttaacgactgttaactaccttttctatttataaatttggaatttcccaatcaatttctctttcgcccatattagctaaaatcgtatttactttagaatatggcttactaccaaagaaaccacgtcttgccgataatgggcttggatgtacagattcgataatatgatgattcggattcgtaattaacttcttcttcgcctgcgcatggcgcccccacaatatgaaaataactggcttttcacgttcattcaacagttcaattacacgatctgtaaagtgctcccatccttttcccttatgagaatttgcttcgccttgacgaactgttaatacggtatttagtaataatactccttgttccgcccattttactaaataaccgttattcgggatttcataaccatattcatctcgaagttctttatacatatttaacaatgacggtggtgttttaacaccaggttgcacagaaaagcttaaaccatgcgcttgattcggtccatgatatggatcttgtcctaaaataacaacctttgtattttcataacttgtatactgaagagcgttaaaaatatcttctaccttcggataaacaacatgcgtgctgtattcttctgtcaaaaaactggatagagtaagataatactctttctcgaattctggtgccaatagtggctcccaatcattctttaaaacattttccatactgtcacttcctgtctaattaattcaccatatcctgtcttgtaaatactacgaacgaaataacaagagaaacaactgcccaaacagttaaattcatcaaagaaaatcccatcgataaaccttgtaatgcaggtaattttcctgataaataatccgttaatgataaattcacactaaaaatatatttggcgccttcccaagatgttgcgaacgagcttaaaataccgcctgcaattaatgcagctagcataacgcccataccagctggtgtattacgaattaaaacagagaccataaatgatatagttccgacaacgatagcaacaaaccatgctagtccatacgccattaagatgtattgccactgcggaataagatgcacaaagttcgtatttagcgtttccttatcaataacaaatcctgttaaaacaggtaaattccatcccgagtatccaaatacaagccctgataatatgtaagcaaacaaacctacaagaaacagtatgagcgaaatgaaaaataacatcgtcacgtatttactaaggagtattttccaacgccgaattggtcgcgtaagtaacatcttcatcgtcccatcacttcgttctcctgaaacgatatcaatggctacaatcattacaagaagcggaataaataatgtaattccttgttcaataaatgctctgacaaaagtcggtgcacccggtgccatcggattaatatcatgatctaaataatattgttgttgctcaactcttacctttaaccaatcacgccattcttctggcaacctagaattgttcaaccggttctgagaatcaacaatttgctgttgcaatgaaaccttccaatcagttgtaccgagtcttttttgtgtcgtttctatttcacgatactgcgcatacacaaaaagcgggatcaagattgctaaaataagcatgacaacaaaaatacgtttcttgcggtaaatcttttctgattcatttaaaactagattcgcaaattcacgcatgctgctcaccccttgtgagttcaataaataaatcttctagcgtaaatacaagctccttaacgctatgtacatctatttcattttcgacaaagtgtttattccaactacttatagatgcaatatccatgcggcatagtaatcgatcgccttctacactcacttcccttacttctttggccgcttctagcatatctttcgccttagaaattggtgtaacaatccattctacacgatcacttgctgttttaattaattcttcaaccttggcaactgttatcatttttcctttatgaataatagcaacgcgatcgcatatcatttgcacttcacttagcaagtgacttgaaataaacacgctcatattttcttcttttacaagcttatgtataaattccctaagttctctaatccctgctggatctaaaccattcgttggctcatctaatatgagcaatttcggattcccaaggagcgcctgcgcaattccaaggcgttgtttcataccaagtgagtacgtttttaccttgtcatgaattctttcatctaaatgaaccatttcagcaatttcaataatacgttcatctgatatatcacctaacatacgagcaaattgctttaaattttcccatcccgttaaatatgtatacaactctgggttttcaacgatactcccaatttgacgcatcgcttctctgaaattttccttaatcgaataaccaccaatagaaatcgtaccttctgtcgccttaatcaatccgactaacattcgaatggtagtcgtctttccagcaccatttggtcctaagaacccgaacacttctccttgctttacatcaaaggaaatattctctacaagagtcttctttccaattaccttcttcaagtctcgtacggaaagtatcgtcgtcattttacccctccttgttctaattttaatttacttacaacattttgaactaaacgttctgccatatacgtataacctacttcgttcggatgaaaatgatcagagtataataaatctttcccgcggttttggaataaatcaaatgtcggtgtaatatatacatttttatcgtttagcgctaacttctctaaagatgcattccagtccacaacaatgtttgaagacccttttaaatcttctacatcttcaaaaggattgtataaaccaagccaaaaaatcggactatctgtatttaatttacgaatttcttctataattttctttgcttcattttgaaacgtttctgtgtcaggacgatacgtctctaaatctattttcccaagcgattcccagcctgggaacaaatcattcccaccaatcgttaacacgattacatctgcttgcttaattgaatattgagcgccattactttcaatttgttttaataaatcgggcatttttgcaccactaactgctaaatttgttaatgcaattttttgcttataatctttttgtaaatcctctttcattcgcccaacatagccaattccttctttatcaccaacgccacgcgttaatgaatcacctaaactaacgatttgtaacgttcccgttttctttttctcttttgccactacatcggtctttttaattaaatttgaagctttcggatttaatacatcatttacacctgaaacaaagccatatgcaaataaacagaaagatgcaattgtaatgagtagaattacttttactacttttgatctcatatcaaaaccccttttagccctcatagattgtccataattataccaaacgcaattttgaaaagcgattttcacaccttatctattatgttgtttccctatgtactaattctggcaataactctacgtgctttacatctattttctcatcattaatcttttcatataataattcgaatgccttcacaccaacatttttactacaatacgaaatcgtcgtaatgcctaaaatatctgccacatcttgatcatcacaaccgataatcgtaatatcttctggaatacgaatcccttgttttttcgcttccgttaccattcccgctgcaatatggttgcaagatacaagaaacgctgttggttttactgacatatgggcccattccctaattacattacgcccatcctccaccgtaaaacagcctttaaacttccagtcctctatcggtgttacagcaatcgtttgaagcgcatcctcatatgcttgttttcttctctggctattaatgctattgcttcttccaatgcaatacccaatacttgtatggccggcatctattaagctcttcatcccgcgcgaaaacactttatagtaatcaatatgcacactcgaaatgaaattcgagtctatttcttcacacataacaatcggaccaaatttcgtatattcttcaagcttttccttactatttgccctggaacatataataaccccatcaagctttttcatttttaacatattcaaaatttctaattctctttcctcactataattcgtctgacaaagcatcatattataattgttttttgctgtttcctttgatattccctcgataatggcgctataatattgatcatttacgtgcggtaataaaacgccaatgacattcgtttttcctttcactaaatgaattgcattcacattttgcgtataatttaattcttctataattgctaaaatttcttttcgtttctgttcatttacgtacggatgattatttagtacacgtgaaacagttgaaacagatactccagcaagttcagcaatctttcttatatttgtcatctcattttccccttctcacaaaaattatcccttgacctggtaagctttccacaatatatcctttcctagcaaatacattttgaaaggatatacaactatgcttcgattcaaattagaatatatatttttcattggcggtctactcactctcgccatcggtattaatatgatgacgacaattacttcctttggacttagcccttatgattccttctttattgcactatatcaaaatttcgggataagtatcggtttttggattttcatgattaattttgcttttactcttatcgtactcttttggaataaaaaacaaattacgatcggtaccattgtaacgatggttcttatttcgctttttgttgattggattggttccattacaactattatggatgctatccgctctcttccaaaatatataacacttatttgtggaaatctattcgttggagctgggattggtctttacgtctctacaaacctttgcgcggcgcctcaagaagctttcgttttgacggttgctgagaagaaaaaatggacgtttagaagaacagaaatttcattagcctttttatttttaacgttaagctttttattagatggacctatctattttggaacaatcatcttatcctttacaacaggctggattatccaagcatttattcaagttggtacgcagattttaaataaaaaagagcctattaagcaagctgcttaataggctctttctgttttatggtaagagatactacttagcatccccttcaattcgatagttcgctttcaaacaatctatttcttcatacccttgcaacgtatgtagaatataatcataatcagcaagagacgcacgatgcgttacaattacaatttcagcctttcctttctcttcaagcggcatttgaataattttctcaaagctaactccgcgctcagagaacaatgaagtaatttttgcaaatacaccaatttcgtcttttacatgcagtcttaaaaactttttcacgacaatttcgtctggctcttttaatactttttgatattgtgggactacagcactatttcctgttacccctaatctaatattttgcattacagcaactaaatccgaaacaacagctgtcgctgttggtaaacttcctgcgcctggtccataaaacatcgtttccccaactgcttcaccgtacacatacacagcgttatattcattttgtactgccgcaagaggatgtgtatttggaagtaaagttggttcaactgtaacctccaatttttcaccatctcgttttgcaagaccgattaatttaattgtataacctaagctcttactatattcaatatcttcctctgtaatagaggtaatcccttttactttcacgtctccaagctctacatttgtagagaaaccgagagtagctaaaatcgtcatttttcttgctgcatctaaaccttctacatctgatgttggatctgcttctgcaaatccaagttgttgggcttcttttaacacgtcgttatatgctctcccttcgtctgacattttcgtcaaaataaaatttgtcgttccatttacaattcccattactttcgtaataagatctgaggaaagtccttctacgatactgcgtaaaattggaattccccctgccacactcgcctcatagaataaatcagccttattatcttttgctgtcgctaataattcagctccatgtaatgccattaagtctttatttgcagttacaacatgctttccgctttttaaagcttgtaaaatatatgattttgcatcatcaatgccacccatcacttcaatgacaacatcaatatttggattatctaaaatttcatttgcatcttgtgttaatagagtagaaggtacctctacctctctctctttctcaatgttttgcactaatactttcgttaccttcactggacaacctacttggtgtatgagtcgttcttgatgatccgtaataatacgaaccacaccactgccaactgtcccaagacctaataacccaacttgaatttctttcatagtactgtccacccctcaaaaattgtgtttagatgaaattatatgagtaaaaaatctgaaaaacaatgtattttgaacattcggaaaaataaaggttaatctttacaaggaaaacgttgccacgtgttacacaatccttctttacaatatataaggggtttcttgatacacgtaataattcaaccaattagaaaacaataaattaccatgactcctccacctaacaagcggcttttcatctggattattatgtttaaaatagttttttggcacatcaatatttaatcccttgtcacgatctcgttcgtattcttgttttaacgtctcacaactatattcgctatgtccaagggcaaacacttgctttccttctggcccaataacaaggtgaacacctgcttcttcagagtttgctaacaatgttaagtctttcactcctctaatatcattctctcgtacttctgtatgacgagaatgcggagcaaaaaacaattcatcaaatccttgtaacaatttcacatgttgctcgcaaacttcatgttcaaatacaccgaacattttttccttaaggggatactttggaacaccataatgatagtacaagccagcctgtgctccccagcaaatatggagcgtagatgttacattcgtttttgaatactccataatatgtttaagctcttcccaataatctacctcttcaaaagcaagggtctccactggcgctcctgtaataatgagcccatcaaacttttcattttcaatatcacgaaacgttttataaaagcttgttaaatgttcttgcgttacattacgagatagatgtgattccatatgaagcaaatgaacatctaattgtaacggtgtgtttccaattaagcgaagtaattgtgcctctgtgtcttgcttcgttggcattaaatttaatatagcaattttcaaagcgcgtatatcttgtgtttccgctcgctccttcgtcattacaaaaatattttctttttgtaacactttgcgagccggtaaatctttatcaattatgatcggcatgtgttttgcccccaactagagctgcttccaaatctgcaataatatcagaaacatcttctataccaactgataaacgaattaaatcagatgtaacaccagctaaacgctgatcttcagcatttaattgtctatgcgtcgtactagcaggatgtataacgcaagttcgtgcatcagctacgtgtgttacaagagttgctagttttacatttgcgataaattcttttgctgcttctaatccgcctttaataccgaaagttaaaacaccactagcaccttttttcaagtactgttgtgccaatgagtaattttcattactatctaagcccggataattcacccattcaatacgttcatgattagcaagccacttagcaactgcaagagcattttcactatgacgttccattcgtaaatgcaatgtttctaagccaatattgctaatatatgcattgaatgggctcatacaatttccataatctcttaatagctgaacacgtgctttcacaatatacgctgctgcaccaaagttttgaacgtaacttacaccgtgataacttggatctggttcaacaagttcaggatactttccatttgtccaatcaaagtttccaccgtcaattacaataccgcctaaggagctcgcatgcccatcgatatacttcgtcgtagaatgaacaataatatttgccccatgttcaaacgcctggcataaataaggagttgctaatgtattatcaacgataaaaggtacctctaattctttagcagcagctgaaaattctttaaaatttaaaacattcatcgctggatttcctaacgattctgcatagataagtttcgtcttgtcattagcaagcgccgtaatttcatctgccgttaaatttggattaaagaacgtaacatcaatgcccagtttacgcaaactcactccaaataaattaaacgttcccccgtaaaccgttgaagaacaaagtaaatgatccccactactacaaatatttaaaactgcgagcataatagctgcttgcccagaagccgttgcaacagctcctacaccgccttctaaatctgataacttctgctcaaatgcggctagagtagggtttccaatacgtgtataaatatatccttctgcctctaagttaaatagggctgctaaatcatctgaagtatcgtatttatatgttgtactttgataaagtggtaaaacacgtggttcaccattttttggcgtatagccaccttgcacacaaattgttccttttccccatgattctcccatctctcattctcctttcttttatacaaaataaaaaactgcccctttcctgaaaacaagaaaggagcagtttgaaaacacgctctaaaggctctttcttatctctcaggattactacctgcaggatttggcacaattccgttatacggctgttgccaaggtttcatcgggcctgtccctccaccttttcttgataagactatgcaattaccgttgattttatagcaataatttcctaatgtcaaacggtttttctgaatgttctaaaataaatgttaacagtttcatataaagcaacaaaagaaatatattctagtctatttcaaaaaagacctttaaaaacctcaaatcagtctataaaattaaataagtaatttaacctataaattcaaattcccctaaagttaacctatatgttgaataggccatctcctcaaaaagatactatatatattcaatccatttttcactagtatatttcacttttttacctactaagatttacataacggaggtataacatgacaaataaaaaagatatgcagtacatacttgctctatatggcattcttctaggatctatagtaggagctacagtctggttatttttagtcacaataaatattggaatccactttatttggggatacttgcctgaagttctctcttttccctcttattacaccctttgcgtaacaataattggcggggtccttgttggtctatcacaaaaacatttcggtacatacccacgccttatgcctgaagtgatggctgaatataaaaaaactggtcgaatcgaatatcgctttgtccatcaggctactttaacagcgattattgttttaattttcggtgctagtcttggtccagaagccgcactagttggaattataggcggactgtgcacatgggtaggggatcgctttaaatttgccttaaagagtatgaatgagctaaccgagatcggaattggagctactttaagtgtcatttttaacgcaccattattcggttatttagcaccaaatgaaaatgagggggaacaaattgctgctttttctaaaggaaaaaaggcgattgtatacttagctactactttcgcaggtttttctgtttatttactactgagtaaactcgataatcgtggatcctttattgttgatttcggggaaggtgcactttcattcaatgaatggatcgcatttcttccacttgctagtatcggtgctatagttggtttcttttatttcaagttagaattcacattagagaagttaattcacccttttagggaatacaaactgacactcggaattatcggtggtattttattaggaattgcgggaacttttcttccgtacacattattttcaggtgagcatcaattaaaagaattagttgttgaatggagccatttatctttttggatactacttctttcagggattttaaagttgtgcattactgccgtttgtttgaacacagggtggcgaggtggacatatcttcccaattatattttccgggtcaagtatcggatacgctgtagcatctattcttcctatagatccagtagcatctgttgccatcgtaacgacagcaatttcaagctatgcgttacgaaagccaatagctataacattactattacttatgtttttcccgcttaatttactattgcccatgcttggtgcagctgctatcgggaatgcctttccgctcccaaaacataacgaaaataaaaattaataaaaataggcagtggggatgaaagctccactgcctatttttttattacacatgctgctttaataacgcttctaactcctcaaaattatgcacttcatatgtcggtataatcccactatcatttaatttcctttctggattaaaccaacaagtatcaattcccgctacatatccacctttcatatcagcgcttaatgaatccccaataatcagccctgcttcaggtgcaaagttaggaatccgttcaaaaacataatcaaaatactctttcatcggtttttgaaaacctgtatcttccgaaacaaaaacatctttaaataatgaatgtaaacctgcattacgcaaacgcttatcttgcgtcttagaaacaccatttgtcactatatacaattcatactctccttgaatttgatttataaattcaaacgcaccttgcatgagttgatttccttcttctaagtagttacgataattattttccaataatattccatctacttcttctccatactctttaaacaacagagaaaatcttgtatttacaacttcattgcgtgatagttctcctttttcaaaagcatcccaaagacctttatttatttttttataacgagcctctatctcgtctgttaaagggattcccttctcttcaaaaagcacccgtaaagccactttttcagccttttggaaatctagtaatgtatcatctacatcaaataacaatgttttatattttttcataaattcatcacactctcttttctacaaaaacaaatttacataaatcgtatcattcattcttgtaaagataataggagatatctcatactatacatgggggtgaaaatatgaaaatcagcaaaaatgaggaagaaatttatcaatacatgcgaatccatcaattccataccctattttcatttcatgtcttgccatatgtagagctgcattcttttcaaacgaaagagatgatatgtagcgaaggaaatgctctcccttatctctattacttaatttctgggaaagcaaaaatatatatgagtcataaaaacgggaaggtttcattaattaattttattcaagcaccatcttttatcggggaattaggattaataggagtagaaaatattactaagtccgttgaagtactagaagattgtgtgtgtttggcacttcctcttaaagattgtcagcaacttttattacaagatgcaacgtttttacagcacttatgtaaatttattggagaaaagacaattactcgcactgaaaatcacgcaaaaaactatagttatccttttgaaaatcgattagctgcttttattttattaacagagcaaaataattgttatatagaaaagcataccgaggcctcggaatatttaaatgtcagctaccgtcatcttttatatgtattaaatcagttttgccaactaaattatttaagaaaagaaggccgaacatattatatacaagatcgaaatacattagaaaaacttgctgatgaactaaaaatataaaaaaacagcattaacgcttacatgttaatgctgttttttcgagtgacgattatacttttaattaaaatttacttgctactttagctgcttcttcaagacctgcagcaatgatttcttctgctttatctgggaattggttatgcccttcaataactactgtttccatgtttgttgcgccgaagaagcccatcatacttgctacatatttaacagccatttctacctcagctgctggaccttctgaatatacgccgcctcttgcatttaataatgcaatcttcttatctccgattaggccaactggaccctctggcgtatatttgaacgttttaccagcacggtttaaataatcaatatatgtgtgcaatactgctggaatcgttaagttccataatgggaagccgaaaacaactttatcagcttctaggaattgatttaaatacttatcagcaactgctactgcttttgcctcttcttctgttaaatcaaatcctttacctaccttgaatgtaccattaatcatatctacgcctacatatggtaattcttctttatataaatcaagttctactactgtatcatttgggtgtgcttctttatagtttgctaaaaatgcctcatataattttacactaactgcttgttccgctggacggttatttgctttaacgaataaaactgttgccattatttattcctcctagtactcactcttatgttgttatatgctttcaaaaaaggtatcccttgtaattgttgttttgttgcttacaaacatattttatctttatataatgacaatttcgtcctcacatagacgtatttttccataaaaaaagtccaccttccaaaggcgaacttggtcttacgactttcgtcttatacaattccatttttcactgcatataatgccgcttgcgtacgatcagataaattcaacttactcaaaatgctacttacatgcgccttaaccgtcttttctgtaataactaaaacagatgcaacttccttattgctcatccctttcgctaatagctgcaatacttcattttctctcgctgttagcacatccacttgaatagaaggttcttcttccttttcttctacaggtaatgtttgagagagaagagcatttgctatatccggatgtaattgaatattacctttatatgcgcttcgaatagcctcaacaagctgatctggttctacatcttttaaaatatacccacttgctccagcccttaatgcaggtaacacatgcgcctgatcagaaaagctagttaatacaattactttcacatttggatactcttttttaatatatgccgtcgcctcaacaccatccatttcaggcatgtataaatccattaatataacatcgggagttgtttctcctactttcactaacgcttctttcccattattcgcttctccaactaactctaaatcttcctgtgtacttaagaaaaatgctaatccttttaaaacgactgtatgatcatcaactaacaatacttttattttcacaaacttccctcattttcacatcataatggtacatttacttttacgctcgttcgtttattactacttacaattttaattgttccaccaactaattctactctttcacgcatcgtagtcatacctagtgatttcttttcttttatattcttttccacaaatccctttccttgatcaactatttctaatgatacatttttctcattcactgtaaaataaatcgtcgcttcttttatacctgcatgcttacttacattgttcagtgcttcttggcctatgcgccacaaagcttcttctactacacgaggtaaatcacgaacacccgtaacttgctccctaattttcagtcccaaattttcaccgtactgctttagagctggcaataatcctttttctaatcccgccggacgaagctgccaaattaatgtcctcatttctttcaaagctccttgcgcaagttcacgcatctcatgcaaagattgatctaccttttcatttttaccttttaaaactgcctcggcgccttttgtcatgaaggttaatgaaaataatttttgcgaaacagaatcatgtaaatctcttgctaaccgatttctttcttccattcgcacaagttcacggcgctgctcgtttaacctcaaattctctattattaacgaaacatggttcgataatgcttgaattacgtctattgtattagcatcaaactctccattattcaggctaacacataaaacaccaaatatatggttttgaatatgtattggtgtagcaataacagctcgatttagatgtacattatgtcctatttgatgttttattagaactggttcatcttgttctaacgccctcttggccgcctcttttatatcctcttttaactcttcctgaacgtaagacgctcgcagagataattctttttcctccctaataaaaagcgctacttgattccattgaaatacttcacctacgtgatttaccactttttcaggtagtacattaaacttatgaatcgtttttaagtcttgaatgaaacgctctaatttcacataataatgtgctcttctcttttcatttccatataattttgttcgctttaaagccgtaccaatttggaaggcaaccgattggagtaatactaattcttcttctgaaaaatgtgttttacccggacttgcaacatttaacaacccaaatttttctcccccagcttttaaaggaaccgtagcatgatgaagaatgccctccgtatccccccaattatattcaattgcattattaattcttttacattcaataatattaacggctctctctaattttccatctacaaaacctcgtaaacaccaacattcaccttcgcacatcgggcgtttattttcatatgtaagtgcctctggtaattgataatcaattaacttcgtatacttcccattttcatccgcaagaaaaatccatcctgtcgttaaacctgttacacttagtaatttctctaggacagcttgcaatacatgatatgtatcatttgatgtatttaatgtttctgcaatttcctttaatataactaattcatttgtacgattatctcgaaacatactcagtctcctgcatacaagattttaaatagctcttaaaataaatcatctacttttcactttgtacttattcgtaacattgatataatggtgagaacatagttttcattatatcactcgagggggctttcataatgacattaaataaagcacttactatcgctggttctgacacaagtggcggtgctggtatacaagcagatttaaaaacattccaagaactgggcgtatacggaatgacatctcttacaacaatcgtaacgatggatccacataacggttgggcacataacgtatttccaatcccagcttctacattaaaaccacaattagaaacaacaattgaaggtgttggcgtagacgctttaaaaacaggtatgcttggatcagtagaaattattgaaatggttgcagaaacaatcgaaaagcacaatttcaaaaatgtagtagttgaccctgttatggtatgtaaaggtgctgatgaagcattacatcctgaaacgaatgattgcttacgtgacgttcttgttccaaaggcattagttgtaacaccaaacttatttgaagcttaccaattaagtggcgtaaagattaattctcttgaagacatgaaagaagcagcgaaaaagatccatgctttaggtgcgaaatacgtcctaattaaaggcggtagcaaacttggtacggaaactgcaatcgacgtcctatatgatggagaaacattcgaccttctagaatcagaaaaaattgatacgacaaatacacacggcgcaggttgcacatattctgctgcaattacagcagaacttgcaaaaggaaaacctgtgaaagaagcagtaaaaactgctaaagaattcatcacagctgctattcgttactcattcaaaattaacgaatacgtaggtccaactcaccatggtgcatatcgtaaatttgttgtatcaaaagaacttgtctaatatataaataaaaaacactcacaaagttcatacattgcctctgtgagtgttttttataagctttatgtcttctggtcatcttatctttaagatacagagctgaccttatttctaccatttcgtttcgagtagtataacgcatcatctgccgcttgaataaattgctccggtgattcttcatattctgaaacccccaccgaaactgtaatttttattttcgtttcatctaacaattgaaatgagtgactttcaacagctgtacgaatttgctcgcccgtaagaattccgtaagctaatcccttattcggtatcaaaagtgcaaactcctctccaccctttcgaaaagccaaatctggaaattgtgaagtttctcgtaaaatacatcctacttgttttagcacttcgtcccctgcaggatgcccgtacgtatcatttacatacttaaagtggtcaatatctataagtagtaaacaaaacgaatcatttttcatgttcttattactaatatgacgattcatctctaaatcaaactgtcttacgtttcctaaacctgtcaatgcatctatcgttgcgtattgtttcatcttttgaaataactcattggattgtaaaacataatttgcacttatgaatgttatgtaacctgtaataatactagaaattaaatataatcccactatgtggatctctttaattaaccatatatataacgctgggattagaatagataaaatatatgtgtgtaaccatacccactttccccctaaagaaagcttcatgcgcgaaataaagatactccctattcctatcgcaatgattgtataaaaagccacttgagaagctaatgaataatccataaacaacagcctagttactaaaatcataccaattgttatggtactcgctatcggtcctccaataataacagctagaataacagctaagtagcgtaaatccaatagaatggtaccaacacgaacactgaaatacattaatactatacctagtatcccagtaaaaatgcctactacacatttctgcccaaaagagaatccttcttttaacggcttatcccttaaaagctgacctccaataaaaataaaggaaagaataattgttgtatttacaaataagtcccttaacataaaataatctccctacttttccatctatccccttcctcaccttattgtatacgaaatacctttaattcccaaatattttgtttatttttgctgttccacgtgaaacagcaaaaaaataaaaagggcgaaaactcgccctttttcattaacaacagcgtgatatttttccaccctttgcattaaatcttgcttcttgtgcctcagcaaaaaattgcttttgacatacaacctcttcttcaggatgatgctttttcatatgctccacatatacttcataacttggtaccccaacgagcaaactaataaagcgttttctttcaccccatacttgccacaactttttaagcatagttcctcgactcactttcatctctaggaatatatggtgcctcttttaacggcattggcttatttcttaatacttggatccaaattcgaagtgctgaaattaacacagcgattacaactatcataaaaattccgcaaagcgccgcatcgatataatcattgaaaataatttgcttcatttgagcaacattttttgctggcgctaacacttttccctcatctaatgctccctgaaatacctttgcatgcgatagaaatccaattttaggattttcatgaaatagcttttgatatcccgccgtcatcgttacaatcagcaacccgacagttggaataagtgttacccaaacgtacgccttttttcccattttgaacaaaattgtcgttccaagtaataatgcaatacctgctagcatttgatttgcaataccgaaaagtggccataatgtattaattccaccgagcggatctattaccccttggtataagaaatatccccaccctaatacacataatgttgtagcgattacattcgctaatgtagaatccgttttcccaaatggcttatatacatgccctaaaatatcttgaatcataaatcggccgacacgcgttccggcatcaattgttgttaaaatgaatagagcttcaaagagaatcgcaaaatgataccaaaatgccatcatggccgttccacctattacttgtgagaaaatatatgccatacctatcgctaatgttggcgcaccacctgtacgtgataaaattgtttgctctccaacatttacagcgagatcttttagttcatttggtgtaatagcaaatccccatgaggaaataacttgagctgcctgcgaaacatctgtaccgataagtgctgcggggctattaattgcaaaatacgttcccggtgttaatacacaagccgcaatcatcgccatcgctgctacaaacgactccattaacattgctccataaccgattggctgtgcgtgtccctcttgctcgatcatcttcggcgtcgtacctgatgaaacgagagcatggaatccagacactgcaccacaagcaatagtaataaataagaacgggaataagtttccagaaaacacaggaccagttccatcaataaatttcgaaactgctggcatttgtaaatctggtgctacaattaagataccgattgctaaccctacaattgttccgacttttaaaaatgtacttaaataatcacgtggtgctaaaagcatccaaactggtaatgccgatgcgataaatccatatacaataagcataatagcaattgtttcaccactaaatgtgaacatacttgcaagtgttggattttctgctacatactgtcctccaacaagagataaaataagtaggataataccaattactgatccttctccaacacgaccaggcctaatatagcgcatataaactcccattaaaatagcgataggaatcgttgctgctatcgtaaacattccccaaggacttccgattagtgcctttactacgactaacgctaatactgctaataaaataatcataattcctaaaatacctatcattgcaattagtcctgtaacaggtccaatctcatccttaatcatttctcctaacgatttaccattacgtctcatcgaagcaaataaaatgacaaaatcttggacagcccccgcaacaactaccccaacaataatccaaatggttcctggtaaatatcccatttgtgctgctaaaatcggtcctactaaaggtcccgccccagcaatcgctgcaaagtgatgtccaaacaatacccacttatttgttggaacatagtctttcccatcgtttaatgtatgggctggtgtttgccgattatcatctaaattaaaaacctttctcgctataaatctactataaaagcgataagcaactgcatatacacatacggcagctactaagagccatacagcattaatggtttcaccttgtgataaagctactaccccaaaagcacctgctcctactgctgtaataatgccccaaagtaagatcgatttcaatgtcttcacatacaattcccccaatactatttcttagtggagattgtactaaattttctgaatatttaacttgaatcctccctatcatgaaggattttcagtttatcatgttaaaatactctcattacctactataattcaatgttatttcgaaggcgttttacataattacgactgactggaatcggttgctcatcatacctatctaaatacaaattatacgtgccattataataaggtttcagttcttttacatatgacatattaattaaatagcttttatgtacacgtaaaaaatcatatgcatttagcttattttctaattcctgaagtgtatatgttgaaatatactgattattcgttgtgtaaattgaaacagttttattttctttatttttacttacatatacaatatcttctgggagaatatatcgtataccctcttgactttctatcggtagttttcgcaaataactctttgctttctcaccttgttctttacctattttatataaaagaaattgtaaatcttcttcacgaaatggtcgcaataaataataaaatgcttggaaacgaaaagctgtaatagattcttctatgttttcacctacaaaaataaattttgtatagcaatttatttctcgtaataaacttgcatattcaaaaccagtaccatctagtaatttggaacttaaaaaaacaaagtctggtatatgttttttcatcataaataaagattctgttcctgtctttgcttcaaaacattctacatttctcatattttcagtgaaattttcagctaactctcttctctcttctgcctcttccatgatcagtaaaattttcatttcttcaaccacctaattctttgtccatatgtcctgttgtatacattcgcttttataagaaataatccctttttcttactataccattatttatctaaaaaaacagaaaaaaggaaaccacttcggtttcctctccccttttatcccgcactaactgcctataaagagccgagtagtgtaggataataaacggtcagggatacgttcaaattttcactttatactaattctcgttgcttcgtttcctgtccaagtattattacagcgaatacaccaattaaaattgatccacagaaaatcgtaaatattaatgatagtgaagcttctgaagcaactaaatatcccactaatagtggcccaagaataccaccaatacgaccaaatgctgctgccattcctgcacctgtaccacgaataaccgttggatactgctcaggtgtataggcgtataatgctccccaagcacctaagttaaagaaggatagtaacatacctgccacgattaatactgttaatgaatccgcaaccccaaacaaataagcactgcaagctgtcccaattaaatacgtaaccaaaacaaatttacgaccgagacgttcaataaaccaagcagcggtgaaatatcctggaagttgagctaatgtcataataagtacgtattggaaactttttattaaactaaatccttttagcaccattacactcggtaaccaaaggaacattccataataggaaaagacaacacaaaaccatagaatccatagcataattgttgctttacgatattccccagaccaaactgattttatattttcaataacagatggccttttttcaactttttggaaccttggggaatccggtaaattccatcttaaatataaagcatataatgctggaactgcactcaataccatcgcaacttcccaaccatatttaggaataacaaaatacgagataagagctgcaattagccatccacctgcccaaaaactttctaataacacaacaattttcccacgttcatgcgcttcaacactctctgatactagtgtagaggcaaccggaagctctccgccaagccccataccaattaaaaagcgtaaaacgagaaacatcgcaagtgttgttgttaatgcagttaaaccactaccgatagaaaataataataatgtaataataaagactgattttcgccctattttatctgatagtatcccaaaaataagcgctcctactgccataccgattgagttaatactgcctatccagcccatttcttgcgtacttaatccccaatccttttgcaaggctaccattacaaatgaaagcattccaacatccattgcatcaaatagccatccaagcccagctatacctagtagtttgcgcttcgaaatttctttaaccttgcccactagaagtcctcctcacacaggtgtctttacacatcattttacatgtgtgaattgtataagtaaaatacttttgtgtaaaaaattctccttcatcattcccaaaaagtaaaacgtctatcccgattggtgagagctaataatctgtggggatgcctcactgattaaagtttcaatttattaaaaatgaacaaataaaaaaagcagcgatatttcgctactttttcgaacgcactacttcttttaaaaattccgctaatactaactgacgacgccagcgtgttggattactgcataatctataaaaccactctaaatgaattgcttgaatccattttggtgcacgttttacctctccagcccatacgtctaaacttccacctactccaacagccattttcgtttctaaacgctgcttattgttttgtataaagttctcttgtctcgggaaaccaagtgcaacaagtaataaatctggttttgcttcttgaatgcgagaaataatattctcttcgtcttcttgtttaaaataaccatcttgtataccggcgatggatacagctgaatatgtctttgttaaatgatctgctgcagcttgtacaacatgcggctttgcacctaataagaaaacagataccggcttactatcttctgataacttcgcaagtaaattacacattaaatcaaaacctgctacacgttcttttaaaggtgtaccaagcatcccgcttgcctttacaaccccaataccatcaggtgtaattaaatctgtattcaataatgtttgatagaacttttcatccttttttgcgcacataacaatttcagggtttgctgttactacctgaaacgtatgagttcgctccgcttctagttgttcttttaaatattggaccgtttcatccattgtcattgtagaaaaaggaacgcctagaatatcaactgtttgtactgccatagttaactatcctctctatcattacaagtttttcgctattaattgcttatatgtttcctttgtatcttcatatagtttttgaagtgagaagttcatagtagcatgctcataaatatgtttacccattgctgctaactctccagttttccacttatcatacgcttcttctaaagctaatgctaatgcctttccatcacctgttggcacaatccatccgtaagtttcatctacgattaatggttcaatttctccagccctagtcacaattgatggtacgcgttgatttgccgcttctaataaaactagtgggaacccttcactatgggaagttaataaatttacatgtgacgacgcaaataattgttttacatcttgacgatgtcctaaaaactctactttatcgttaatccctttttcagtagctaatgactttagattttcttctaatgggccatcgccaactaataatactttaattttctctaattttgtttgttgtaacgcatcgaataaaacttcatgtcctttgacaggatgtaatcgtgctacttggattgccgtaaatacatcttcatcaatattgaacatttcttttttattatagccttctgctttttccttatcgtattcaattccattataaataacatgcatcttttcatttgaaatacctaatgctgccaggctttttttcaatctatttgttacaacgaaaaataagtctatattttttaaggctttcaaatttaatttcgtaaaaatccaaccttttaagccctgtttagtaaagtcttgaaatggatcactatgaatagtcgttacccattttgcctttattctctttttcattaaagaaacatagaaattagccctagggccatgtgtatgaactacatcaaatttttctttattaataaattcacttatattctttaaaatggataaatcatagcgcgatttttgtgaaaacacatggacttttatccctaactcccttgcttccttcgcaacaattccatcttcaaatactgctaattctacttcaccagttggaaactgatcgagaagtgaaataatatgtgttttccctcccccatcttctgctcctgcattcatatgcaatattttcatattttttcctcctttaaatcctcgctacgtttccatctatttttattttactgtactaaaaaataaaagctaacaaaagttagcttttatttttatcattcaatttctaggtctactattagataagctaacaccactacaaagtaaatcccaactcctggtgctgttaaaatatgtcctgcaatataagcaatacctaacgctaacaataagcttgctgaaatcattccatattttatattaaatatgtccttaaatctcgtagcaaatgctagtagaattcttagcccgtaataaataaatggaatcattagtaatacaaagccaataatcccgaaatcataaaaccaatcatggaagtccatttcaattagttttggatctggctgcttttgttcattgtatttaaagttacctgcataacccattcctaataacttttgtgacattggcgcttctttaaagaactgcttatgtctttcttcatatacttgacgtccactgaaaataagattttcttgattttctttcttttgctctttctcaagctctttcttaacttcctcttctatcttcgccttttcttctggcttttcaactttatgatgattttcttcttttgctttaagttcttgctcttttttcagcttctctttaatttctttttctttttgaccttgctgtgccacattttgctctgataaataattattgtgaatacccatattttgtgctaatggcgtttgtttaaacgttccgactacaccagctaataggacaatagcaattactgcattaagtgcaagggattttttgttcggattttttctatcaaataataattgtagtaaaataatcccgattgctgccgctagcgtagcaccaattgagcccattcctacttttgtaccaacttgaattagcgaataaatcattaaaagtgatggaatccaatatagaatgtgtttccagctctttgttttttggatagaatatagtactacaatagggaaaataatagctaagattgaacctagttcattccctgcatagaaccaacctcgagaaccaaccttcatccattcataactaccaaagtcagtagatgttgaaatagaaataaccataattgcgttaatgattaatgtagaatatacaatactatttcgaaccttatcactaatattaactgtctttttcaatgattttaaagctaaaatgtatgatcccagcatgatatatatatataatgctttcgcaacgaatttaacctcttcactaagtacaataggatccttaactagtttgttattaataaatcctatacctaaaactccggctaacaatataagataaattaaaaactttctattttccttctcttttgcctgaattaaaatgtaaataccaccaacagccataataaggaatcttactaaaattccaacggtagcatttgactttaataaagtgatgctaagagacgttaataaatctaaaacaggctgtaaaataataaaaaagagcaaaaaatgctcaaatctaaccctagcttgatttgctaacattccaagacctccatacaaaatcttaacattatcttttaatcataattttttatcattcaaacacacctagcaattataacataactcatattcaaatcgagaactatttttccagctaaaactagccaggacaagtattaatcagtaatagaaattatcgtcctttagctatactcccctatttttataaaatctatctaacaaccatccccttatttttgtcagtatataaatatttttttatcattttatacaaatataaataacctacctataattgtaatgttttaccaaataaacaacatcaaaaaatgtaaaattaatcttttcatatctttttcaaattactttatggctattttccaaacattttcaaacgctttctttatgaattttatccgtttttctacatgtagcgaaaagtaattgttatttccaatactttagtgtatattttttctctggaacatctttaagaggaagggattaaggccatgttattaatcgatatatttacgtttcttggcattatcgccgctgccatttctggtacattagttggtttaaaaaaagatttagatttatttggtgtcctttgtttagctgtagctactgcgctcggcggcggtattattcgtgatatcatgattggtaacctgccccctgtcgcatttgtaaaacccatttactttttcgtaagtgtattatcagcattatttacttgcatgttttttgagcgcatcaataaacttcaagtcgttattatgctttctgatgctgttggcttaggtgtttttacagctattggtgcaaatgcggcaatgtcacatcatgttgacgcctcatttctagttgtttcaatgggagtcattacaggtattggaggcggtattttgcgtgacatttgtgctcaagatatcccttacgtattccgaaaagagatttacgcaatcgcttctatcttaggagcaattagcttcctaatcacacacgctatgggggcgcacgtgttagctttctatgtttgtttattagtaacattcattattcgtgtcgtcactgtaatatataatgttcatttccctgttttctttaaaacacatgctaaaattaataaaggccattaagagaattctagatagaattctcttaatttatatactattcaacgaactaatatagagtaattatatataagcatatataattactctatattagttttaaaattgaaaacgttttatatacagggggaagaatgatgcttggggttttcaaaaaaaatattaataaaacaaatgccagtataatcgaattaagtaaggaccaacaaataacttttaatgtccctactaattctgaattaaaaattcaaatggatatgctacatatttcaaaagaagatttacaagttgtaaaagtactacagccttttatttatgcagaaattgattggattactgaaaaattctatgccaacattacaaaacaacctaatttaattactattattgaacgttacagctctattccaaaactaaaacaaactttaaaaacacatattaaagaattattcagcggcaatatgcatgaagattttattgaacagcgtgttaggattgccaaaaggcatgtacaaattggtttacatcgaaaatggtatactgctgcttatcaagaattgttccgctctatcatgaagattttgcaaacaaaaataacaacaatcgatgatttttcctattctataaatgttataaataaattatttactcttgaacaagaacttgttcttgcagcttatgaatctgaatatgaaagaatgcaaaaagagcatgagaaagaaaaagaactaactgctatgacaattacgcatatcgcaacagaactagctgctgtatctgaaaaaacaagctcttctattcaaaaactaaccgccaaatctgaaactattgtagagattgctaaaacaggtacatcattagctacaacatctgaagaaaaagccaataaagggaaagaacaattaaaccagcaaaacaaacgaatgggatctattcaaatgaatatggaaacgattattacagatactcatgaactccttaatatttctaacaaaattaatgaaatcatagatattgttaaatcgattgcggagcaaaccaatttactcgcactaaatgcagctatcgagtctgcacgtgctggagaatttgggaaggggttttctgttgttgctggtgaaattcgaaaattatcagagcaaacgaaagaatctatatttaacgttacaaagctcgttgaaaaaacaaatgaacaaattacccgtgtctcgtcttccgtgaaacaaattagctctctcgtatcggaaggaacggatagtatgtcagcaacagatcgatacttccaagaaattgtaaaagatatgtctaactcaaaagaacagaataagaaaattgaacacgagctacaagctatttcacaagtaatgaaaggaattcaagatgattcctcacaaatggctctaacagccgataatttacaactagaactaaatcgataagataaagtgaaactttaatcaacggaggttttgttcatcccccgttgattatcagccctcaccaatcgggcttttacgggcagcccgccccccacctaacttctttgctttcgctgattttgaggtgggggtcttactgcctggaaaatagcgggatcaaattcaagtcaggcatacttttcatctgcactgactactaaatttcatcttccatcaaaaaaagaatccagaatggattctttttattttctgaaaaatattttttgacaatacacataactcatataaacaccaaagctctgcaaaatgaacaatgacggcataattacattgtaatatgccatatctacttgaaagagctttaacaatacgtagccactaattaaaaataagaacaacatatatccctcattttgttgtttcttaataaggaagtgtaatagagctatagtcataaacaatgttacggctatatatatcagtttttcacatttgaaaagaatagaatttaccccttcatctgaaaactgatttatcatcggctctaaaagtttaaatctttctccctcaatctcttttaacttttgatcaatatgctctgttacactttgatttttcgatattttttcttcatgttgcgtctttccaattaaaacagattgaacatacgtctcatttgaaatcgtatattgtgacaatcccattgccttaattccataattcacactaaaatgggcactataaaatagaataagtatccctatcatttttagtaacaccttttgtttcgttgctgattgaaatacttcgattaataatacatataccgtaataaaaataggaagaaataatcccattgggaaaaccatattactaaatgcaaataaaatcgctgaaaacacccacatataaggatgatctaatcctttatataaaagtatgtaacaagcaaaataaaataaaaatattgcaagtgattcaggagttaatacggaactcatgaatatatttggaatatacagagcataaaagatagaagcaatacgaccgcattcttctccaaaaaccattcccgcaatacgataaataaataatgctgttcctgtgcaaaatagcacattaaatagttgtaaagcgaataatgaatcaccaaatatacgaataattaccgactcatatataataaaaggcaaatgagttacagtccctatattattaccaattgcaatctgctttgcagactcatacatcactttcatatcaccaattattggagcatctacaaataacagcatactaaccctcacaactatagatatacttataagaaaaataagaaattgtttatctgtaaaacgatattgtagaattgatgccactaacaaaataagtatgacgaaaattgctaatatgattgttacacttgttgtacttcctccaaaaaattgcttacttgtctcaaatgctgcccaacaactataaacaaaaaatgcgagcatcgcaccgattgtaattttattgaagaaagatgaaaaatttgtttgtatatgattcatatgtccattgcacctctatttccattcataacaaaacgattctatcatgaatggggacacggctgatagggaatttctatgacaaatacatagtcattactttttacttgcaatgtaagcgaatcctcttttacactacattttagataaaataaattttctttcagttacatgaatacaaatacagaagtttaaataatcctcttttggaatacactttacttcattaaatatctaatatgagtaatctgcttacacatattattctgattgaaaacagactataggggctgaatatatggaaaagaaattcatgcgagaatctaaagcaattaagacaacacgtgtttttcctaacgatttaaataatcaccaaacactttttggagggaaattattagcagaaattgatagtattgcttcaattgcggctgcaagacatagtcgtaaacattgcgtaacagcatctattgattcagttgattttttaactccaattcaccaagctgattctgtttgttatgaagcatttgtatgttatacagggaaatcttcaatggaagttttcgtaaaagtaatcgcagaaaacttattagcaggcgagcgtagaattgctgctacttgcttcattacatttgtggcaataaaagatggaaaaccttcatccgtaccacaagtacttcctgaaactgaagaagaacattggttacacacaaccggtttagaacgcgcggaaaaccgaaaaaagggacgtttaaaaagtaaagagatggctgaagttttaactttaagtaagccatggaatatataatacgatactctcacttcatacatgcacaggtttatttcatccttgcatgtattttttattgtaaaaaattccacctcttatcttttatttactgtttgtctcctaaaataatccaccagtttttcctttattttgctatactattaatggtatattagataaggttcgtttaaaaataactataatataattaagtatataagggatggtgcgataatgtctattgaggtaccaatttcaataccaaaaacgttaattattattcctgcgtataacgaggaagaagcaattgcagatacattaacaagattattaaaactaaaacagcattttacagaattaagcatttgcgttattaatgatggatcacatgataaaacagctcaaatcgtaaatgattttcctgttcaccttgtgaacttaccatataacctaggtattggctcagctgtacaaactggttataaatacgcttatgagaatggatatgatattgcgattcagttcgatgctgatgggcaacataatcctgatgatttgtacaaaattataaaacctattgctgaagaccaatgcgatatggtgctaggttcacgttttacagagaaaacagcctataaaggtagtatttctagaagaattggtattttttattttactgctctactgaaagtactaacaaaacaaacctttatggatccaacttctgggtatcgtgctatcaatagagaagtaattaagatttttgcacataattatccaaaagattatccagaaccagaagtccttattcatttaaaaaagaaaaaattacgcattaatgaaatatccgtaaatatgcaagagcgtcaagggggacaatcttctatcacacctcttaaatctgcatattacatgattaaagtaagccttgctatattgatgcaaaaaattgtgaaaggttgataataaatgcctataattaccttttcatttatcttcattctattattatttttattaattattaattccattcgtcgtggagctttagaaactaaatatgctattttatggatttttgtttgtgttgcaatggctattttaagttctactgaaaaaattataaattggattggccaactattacacgtagaatatcctccatctgttttattcttatttggactattattctgtttcatattaatttttgacttaacaagaaaaatttctaaattacatcatcaacttgtaacgttaacgcaagattatgcgttattaaaacaaaaattaaaagtaacgcaacctgaaaccgataaagaatagttttctatttaaatatgaacatatacaaaaaaacatcttaattttttaaaaaaattaagatgttttttattgcaaactatttttttctaattaataatttactaattttcataacagttgccacggtcccaactccaattataataaataagaatggtattaacggtaatgcatatcgttcatatgcaacataaaaacatgttaaagctgtttgcaataaaaggattgaccataaaaatgtagtctctctccacctttttaaaaggaaaataaatgaaagtactgtacatattaaaaacgtcgtcttaataaaattatatatttcattcatatcctttgcagaaacattgaatacttcaatattatgctctatagaataatacggttttttccaaagaatttctggcttcaaaactaaataactctctatcatagattccttatcagttttccaccattccttcattttatcaatcgctattttttcttctaattccataaattcatgtgcttcaagattagggtattttgcatgtaactctatttcaagttcccccatatccttaccttctgggtaacctttcccttgatacgttccaagtaataacggattccctgccccagcagttagtgggataaatttatcaaattgaatgtaattgcgagcccaccatggtccaagtacgataagtcctattcctatgcttataatcgcttgcttcatcataatacggaatgggtagcgtttcattaaaagatacccaaatagtaagattggatataaggcaatttgtacacggaggtacagtgctaaaaagtagaaaattaatacaatcagaagatgtttcgttttatgagtatcagctaattttaaactccaatatactaatcctaatgaaaggaatagaaacggtccttctgttaaagttaaattttccataacaatctctggaggatacacagctaataagaaagcacctattaatcctgcagcagaattcaataaataagtaccaatcttataagttagcaaaatactaagtacccctaataggataataattaattttgctacaaaaagaccttcactgccatttccaaaaaaataaaatacaacagctaataaagctggaaaacccggcataatatgaatcgttggtttatctggttcatgatatgttaacatccctgtttccaataaaatatttgccgttttttgataacctatatcatcgctagctatagatagatctgcaccatgtgtttgtaaagttgcaaaacgaagtgcaaaaccgactatcataataatccctaaaaggattatattagatttgcgagtaaatcgccctaacatctcatcttctcccttcagatacataattttcaaaatatatttctatatttttacaacacaatacgttctataataaatactttttatacaaagtacaacaatagaaagttgatttacaaagtttatatgcgttaaacttatacagatgttcttgtaatcttcttccttccaaaaggcttgtatatatgatgcaagacataaaaaacttgaggagataaaaattctatgatggaacaaaagcaacttgtttctgttgtcatacccctgtataacacggaaaaatatattgaagaaacgatgcagtcaatactagatcaaacatataaaaacattgaaattgtaattgtagatgatggaagtaaagatcaatcaccttctattgtgaaaaaccttgctgaaaaatacccagggcaagtaaaatacgttcatcaaaaaaaccaaggtgtttcggtagcccgtaatacaggtatcgaaaatgctagcggagaatatatcgctttccttgatagtgacgacttatggcatccaactaaaattgagaaacaaatcgagagtatgcataaaaacaacatggacgcgtgctattgtggttatatgaatttctacgaagaaacaggcgagaaggttgaacatacaacaaactttattaaaggtgatatggcaaaagcattcctaacacatcaagttgttgctcaaacaagtacttggattttcaaacgatccatcgtaatggatcataacattcgttttacaccaggatgtagttggggagaagatttagagtttttatttaaacttatgagtttgacaaatgtatgttatgtcgatgaatacttaacttattatagaatcttatcagaaggaaatctttcttctaagtataaagattatgaattaaaaacaacaaaagagctagaagtattcaatcgtatgaaagattgggtacataataaatctcaagacttcattacgaaagaccctcagtcactgattgagattcttgagacttatttattcccttatacagtcatcaataacgcttgtatatatattaaagaaaactctcgattagataaatcacaagttcaattaatcaaaaaagatataaggaaatattgccgtaaaatctattcaaagaatggaaagcgtagtaaaaaactatatgcaatgctttggtttgtacgaattaaatttctgttttcttaaactgaaaatataacgatactctctctttctgtgaacaaattaaatttacaaataggacaaactaaccgggtcctaaagaatagaaaggtcttttctcatgaaaacaaataaaattctaaaaaacgcatcctacctctttgtaggaaacattactgtccgctttgtactggctattgcaacaattttctttgcaagatatgtttctccaagtgattacggtatgtttacaactgcgttagcagtttcagctgttatttgttactttacagatgcaggtttaacacatacgtttatgcgtgaaggaacgagaagcgatgctaatattagtgtgctaataagtagttatttacgtattcgtttaatattagctatcgtaatttctgtacttttcgctatttttgcccagttcttctatcccgatgcttacttacgtgcgatggtatattgggttgtcctaccaacaatgttcggagcaaccttacaaggtgttggtatggcttacttccaagtaacagaacgcatgcaatttacagctattatttctgtactacaaggtgtaacagctgctgctgccctattactagggatgtctttccaatggtcacttatgatggttgctgccatgtacggggtatctagtcttgtaacaggtgttatcgcctttataatgacaatacgttacacgaaagtccataagggttgggataaaggcattttagatcaactacttattttcacgatcaacggaatcattattatgctcttaccacaattgggccctattatattagaaaaggtttcaacatataagcaagttggattctttggtgctgcatctaaaatacctgctgtactatatcaaatacctggagtaattgcagctgctttttatccaagactttttgcttttggtaatgagaaaaatattgaagaacatagaaaattatcaagttttgaattaaaacttatgtcttttttaggaatgggaatttctatcccctttattgctgatccaagtttctggattgttagtttattaggagaaaaatacgctcccgctggtgacgctcttgctattctagcgtttatggttattttacaatcaattaactatccactagccgataatttaacaacgattggccagcaatggaaacgtgcaacaacaatgactattggattagttgttgccatcataggttatattgtattaggtagtaaatatggaatgatgggggcagctgccgcagccatcattaccgaaattacactattaattggatttaccctctttattcgtaaaggcatgcaattattagttaaaggaattatatttaattccttagcctttattattagttacggtatataccgaattgcattaatcaacttaccaccattagttgctttaactcttactggtatactatacggtataatcggaattgtaattgatcctcaaatacgtggattcgttttaggatttataaaacaaaagcttattcgcaaacatgcttaaaagcaaaaagcttttcctatttaaaaatggaaaagctttttgcttttttatataccatcatttttcttcagtaaaaaaatgctatatattccagctcaaattgacttactttctgaaaatgccttatactaaattacatgtaaactatgaacttcaacgcttgtaaaaatatatatgcttcaacaaaaatatatattttctcatgttaaaactaaagaacacacctttaaaaattggtgtgtttttatatgctacctaaaaactagttgctacatgtaacgactttcaaaggaggattatcaatttttatgagcataaagccgaataataaattcttttccaagaaaacaataataattatgccaatattattattgtgcgcttttgcttttcattatttctttttaacatctaatcaagccttttctggtacaggggatgcgttacgtcaatttggtttttttacgtttcttctacaacatgcctttaaagatggcaaccttttttggtcttttgattatggattaggtggagatttatttggagagtttagttattattacagcacatcaccgtttttctggattacactgttactacctaaactaagtcttgagcaagtatatgacgtgaaattatacatgagtattttaaaaaactttttagctatggtattcatatatggttctttacgttaccataataaaacagcattctcatcttttgttgctgctattatatatggtggttgtattactttcatccgccactctttactatgggatttcatggctgatgccattgtatttttaccattagtaatatggggacttgataaatatattattgaaaagaagcgcggacttttcctaatcgctgctactttaatgttagcatcaaacttttattttgcttttatcacaagtattttcatatttatttatgcattattccaatactttgcgacacaacaaaataaaacgattgtctcttttctaacttattatattagaatcggtttattgtatggattatcactcggtttagccgccgtttgcttcctcccatcagttaatgccgtatttagtgctgatcgactatcaaaaaagtttgagataccattattatttgaagataaattttataaagatttaatggaaaatattttcttcatgtataatgctgaaaatcatcaattagctttaccagctttaattttattcttaatcgtatttggaatgtttatacgtgataaactcgttaaaaataaagtattctttacgttattcatgttcattctgtttatgcttccatatacatattctgtgtttaatggtttttcagcaatgcaatctagatggttctatttatttgtatttgtaattgcccaaacaattgcatacattctagattggatgattattcataagaaagactacaaattaccttatttaataagtttattagtgtctattggattattcatttatgcattttatagaaaagcaaatataaatgtaactgataaacctttacaagacgttgataacattttactcggaactgtcgttctttctgttattacagtatgtttatggcgttatatttccaaacctttcatacaatttttagttgtattgaatgtactcgttagcacaatttctatgaattatatgtatgcgaataatatacttagcaccgtttacggacagagccagatttcaactgaaaagttacacgaaccaggctatgataataaagaagaaattgctgcaattcgctacatacaagaaaatgataaagacttttatcgtattcttaatccatatagcgaatataacacaccaatgctacaaggttatcatggcttaagtacgtatcaaagcttagttaattattatgtccatgactttatgaaaaataaatatggtgtattccaaatgtacgatacaccttcaatgttttatcaagctgatagtcgactactacttgaaaatatgctaggtgtaaaatatcgcgtattaagtgctgatacagattcaaagaatgtgccttatggatataaactattacagcaagtaggaccgtataatatttacaaaaatgactatgctttaccgttaggatatgtatatgattcggctataagtgaggaagaattttctaaattaaacttcgctcagcgtgatcaattattattacatgctgttgtcgttaataatacaaaagaattttcattaaaccattttaataaacaagaccttaaatcaaaggcagtatctattaaaacggaaaaagcaaaattcgaaaacatagaaaaacaagaaaataaactaattgttcatggctttggaaatatgattgtacctatcaattatcctgatacacctggtgatctactgatagaattaaaattaaaaaatgcaggcacattcaatgcaactgttaatggaaaaacgataggaaaaggggacgatgctggtgcatactcttatccgttagaaaggtttgtttacaatttgggcaatgagcgtccagaaaacctaactatctctattgatatggcaggtgagtatgaattaggtgacttgcaagcaaatattgtaaactatgaaagtgtacaaaaagaaacaaaaaaactaactgaaaataggcttgaaaatatttattataagaacaattatttaaaaggggatatcaaatcaaataaagacgggctcttatatttatctgtcccatatagtaaaggctggactataaaaattgatggaaaagaaacagaatttacgaaagcgaattctgcctttatcggtgttcccattacaaaaggttcacatgtaatcgaaatgacttacgttacaccttacttcaaattaggtatgattatatcaatcatctcactaattatctgtatagctttactaattttcaaaaatccaaaagcacgacgaaaattttcttttaaaaagcaataatgagcaatcaatgaatcatgaatctatccaattggatagattcatataaaaacgcataacattgttttaacccactacaaacaaggagtgtcaaaaatgactctttcaatcgttgtaccatgctacaatgaagaaaaggtgcttcgagccttttattcagagacttctcttgaaattcataaattaactaccgattatgaatttgtttttgttaatgatggtagtaaagatgatactttaaatattttacgtgatttagctagttcagattcgtcagtacactacatatcatttagtcgaaacttcggaaaagaagctgcaatgttagctggtttaaaatatgctacaggcgatgcaattgttattatggatgctgacttacaacaccctcctacgttaataaaagaactgttagaaggatataacgacggctacgaccaagtcattgcaaaaagaacaagaactggtgattcacccgttcgctctttcgtctctcgtctttactataaagtgatgaataaatttgtagatattgaattagtagacggtattggtgactttagacttttaagtcgaagagcagtagattctttattatctttaagtgaatacaaccgattttcaaaaggcttattttcttggatcggttataacgaattaatcattgaatatgaaaatgtattacgttctgatggagaaagtaaatggaccttctcgaaattattaaattacggaattgatggtgtaatttcatttaataataaaccgttacgtctatctatatatctcggattactaacaaccattttaggacttttatacgtaatcactacgttcgttcaaatcatccttggtggtgtggaagttcctggttactttactctcatttccgctatactatttattggcggtattcaactcatattcctaggtgttattggtgaatatatcggtcgtatttattatgaaacaaaacgtagaccgcattttattgtagctgaaaagaaagttagtgaagttaaacaaaaggcataaccaaaaagttacttctgtaggtagaagtaacttttttatatactaacatttacaaacacttcttttgaaaaaatatacattttgaaatgatggcattatatgaaagaatttagtatcatgattcaaggtactatttcaagttggacggaggatactatgagcttattaacagttgaaaaattaggacatacatttggtgatcgtacattatttaaagatgtatctatgcgattattagcaggtgagcacgttggattagttggtgcaaacggtgttggtaaatcaacattcatgaatatcattactggtcagcttattcatgaccaaggtcgtgtagaatggacaccgggcacacattacggctacttagatcagcatactgttttaacgcctggacgtacgatccgtgacgtactagcggatgcatttttaccgttattcgaaaaggaaaaagctttaaatgaagttacagaaaaaatgggaactgctacaccagaagaactagaagaacttcttgaacaaatggcagaaatacaagatgcacttgaagcaggtggtttctatttactagatatgaaaattgaagaggctgcacgtggtcttggaattgatgctattggtttagatcgtgatgtttcagcactaagtggtggacaacgtacaaaggtattgcttgcaaagctattacttgaacagccagaagtattattgcttgatgaacctactaactatttagacgttgaacatattcattggttaacaaattatttaaaagaatacccacatgcattcttattaatttctcatgatacggaatttatgaacaaatgtgttgatgttattttccatctagaattcacaaaaatgacacgctatacagcgacatatgaaaaattcctagaactagcagaaatcaataaaaatcaacatataaacgcttatgaaaagcagcgtgagtttatcaaaaagcaagaagacttcattgcaaagaacaaggctcgttattcaacaacaggtcgtgcaaagagtcgtcaaaaacaacttgatcgcatggagcttattgatcgtccggaaacagcaattaaaccggaattctcatttaaagaaagtcgcgcaagtagtcgcttcgtctttgaaggtgaaaatgtagaaatcggatatacacatccgctactaccaaagctatcaatgacgattgaacgtggtgaaaaaattgctattgttggatgtaacggtgttggtaaatcaacgttactaaaaacaatcttaggtaaaattaaacctttaagcggtaaaacaagccttggtgacttcttagagcctgcatactttgaacaggaagttaaagctgataatataacaccaattgatgatgtatggaatacattccctggtttagaccagcatcaaattcgtgcgatgttagcaaaatgcggattaaaaaatgaacatatttctcgcccattaagtcaattaagtggtggagaacaagcaaaagttcgtttatgtaagctaatgggtgaggaaagtaactggctactatttgatgagccgacaaaccatcttgatgttacagcaaaagcggaacttaagaaggctatgaaagcatataaaggaacaatcctccttgtatgtcacgaaccggacttctatgaagattggatcacaaaagtttgggatgttgaagaatggtctcaaaatagtaaatagtctttaagaaaaaactccttgtgtacacaaggagttttttacttgtttctattaagaattttttatattgtagtatcctataaggcgtaatcgaaattcttttaattccggatacgcctctaaatttgctaacatacctctaattaccggaattcttggattaagcaatcgcatttccgcctctaaaacatctaacgttactaacaactcatcatcctctaattgatccgctaaattacgcttaaatacaataatttcttttaaaaaatgctctttaacttgttccttaatgagctctgatttacaaaggaattctccaagcttttcttcatgtaaaataggttcttctgaagattctaccaaaccatttactaaatgatctactctttttaaaataaaagcagcgacatacgataaatcaatttctggtgcttgtaaaataattaattctaaataaccacggcatatgccttctactataattactaaatccaataaatatggcataatcttttcaccataaatggacaataaactattccgataaaatgcatgagactctaacttcatccgcatcataaattcttccacttctttattaaacggaattgcattttcccttgcatgcataataataaattctttatgtttttgtatatcattaaactgacagtgtaattgttttgcaaatttttcacgtggtaataaagactcttgttcaatatccagcattttcttttggattttgtcataataatatcgaagtgtcgctaataaaagctcatcttttgatttaaaatataagtaaaaagctcccttagatataccactagctgtcacaatttcctgcactgatgtcgcatttacacccttagtagcaaataacttcatggccgattctataattaaacgctctttttctttcatatcttctctcctaaatttaatctcgcatctgattataaatgtattataccatctctttttattgacgtttgaccgaacggtcagttatattatgtattagactgaccagttggtcaatataataaaaagggagcgcaaacatgaacaaaatcatcaatttctcgttaaaaaataagttcgcagtttggctactaaccattattgttactattgcggggatctactctggactcaatatgaagctggaaacaatccctgatattacaacaccgattgtgacagtaactacggtctatcctggtgctacaccagaagaagtagctgataaagtttcaaagccgatggaagaacaactacaaaatttaagcggtgttaacgttgtgagctcatcatcttttcaaaacgcatcttctattcgagtagaatacgattttgataaaaatatggaaaaagcagaaacagaaattaaagaagctcttacgaatgtgaagctcccagatggtgttaaagaccctaaagtttcacgagtaaacttcaatgcttttcctgttatttcgttaagcgtagcaagcaagaatgaatctttagctaccttaactgaaaatgtagaaaagaatgttgtaccaggattaaaaggacttgatggtgttgcatctgtccaaattgctggccaacaagtagatgaagtacagcttgtcttcaagaaagataaaatgaaagaactaggactaagtgaagatactgtaaaaaatgtgattaagggatcggatgtatctttaccacttggcttatatacatttaaagacacggaaaaatcagttgttgtagatggcaatattacaacgattaaagcattaaaagaacttaaaatcccagctataccttcctcacctaacggtcaaggtagtcaaaatgccggcgctggtgcacaaacgccgcaaatgaatccagctgctatgaacgggattccaacagttacattagaagaaattgctgacattaaagaagttgggaaagcagaatccatttctcgaacaaatggaaaagaagcaattggaattcaaattgtgaaggcctctgatgcaaatacagttgatgttgtaaatgcagtaaaagataaagtaaaagatcttgagaaaaaatataaagatttagagattatttcaacattcgaccaaggtgcacctattgaaaaatcagttgaaacaatgctaagcaaagcaattttcggtgctatctttgcgatcgttattattatgctgttcctgcgaaatattcgaacaacgttaatctctgtcgtttcaataccactttctttattaattgctgttttagtcataaagcaaatggatattacacttaacattatgacacttggagcaatgaccgttgctataggccgcgttgtcgatgactcaattgttgttattgaaaatatttaccgacgtatgtcgttatcagaagagaaattgcgcggaaaagatttaattcgtgaagctacgaaagaaatgtttatcccaattatgtcttctaccatcgtaacaattgctgtatttttaccacttggactagtaaaaggtatgattggtgaaatgttcttaccattcgccttaactatcgtcttcgctttattagcatcattactagtagctgttacaatcgtaccgatgctagctcactctttatttaagaaagagagtatgagggaaaaagaagtacatcatgaagaaaaaccaagtaaattagcaaatgggtataaacgcatacttgcatgggctttaaatcacaaaattattacatcaagtatcgctgtccttctattggttggtagtcttgcacttgtaccagttatcggtgtaagtttcttaccttctgaagaagaaaaaatgattattgcaacatataatcctgaaccaggtcaaacgttagaagacgttgaaaaaattgcaacaaaagctgagaagcacttccaagataataaaaacgtcaaaacaattcagttctcattaggtggagagaatccaatgagtcctggtcaatcaaaccaagcaatgttcttcgtgcaatatgataacgacacgaaaaactttgaaaaagagaaagaacaagtcgttaaagatttacagaagatgtctggcaaaggcgaatggaaaaaccaagacttcggagcaagtggcggtagtaacgaaattaaactatacgtttacggagatagctcagaagacattaagcctgtcgtaaaagatattcaaaatatcatgaagaaaaataaagacttaaaagatatagattctagtattgcaaaaacatatgcagagtacactttagtcgcagatcaagaaaagctgagtaaaatgggcttaacggctgctcaaattggaatgggactttctaatcaacatgatcgccctgttctgacaacaattaaaaaagacggtaaagatatcaatgtatatgtagaagctgaaaaacaaaattatgaaacaatcgatgacttaacaaatcgcaaaattacaacaccacttggtaatgaagtagctgtgaaagatgttatgactgtaaaagaaggtgaaacatcgaatacagtaacacaccgagatggacgtgtttatgcagaggttagtgccaaattaacatctgatgacgtttcaaaagcatctgctgcagtacaaaaagaagtagataaaatggatcttccttctggtgtagatgtttctatgggcggtgttactaaagatattcaagaatcatttaagcaacttggcctagcgatgttagctgcgattgccattgtatacttcgttcttgtcgttacatttggtggtgcccttgcaccattcgcaattttattctcgctaccatttacaattattggggctcttgttgccttattaatctctggtgaaacattaagtgtatctgcaatgattggtgcgcttatgttaatcggtatcgttgtaacaaacgcaatcgtgcttatcgaccgcgttattcataaagaaaatgaaggactatcaacacgtgaagctttattagaagctggtgcaacacgccttcgtccaattttaatgactgcaattgcaacaatcggtgctcttatcccgcttgcattaggatttgaaggtagtggcttaatttctaaagggcttggtgtaacggtaattggtggattaacaagttcaacgttattaacacttcttattgttccaatcgtttatgaaatattaagcaaatttaaaaagaaaaaaacaaaataataaaaaataacctcgctaactgcgaggttattttttatttccaaacaagattaggaaatcgccatagccttctttctctaattcctcttttggaataaatcgaagagctgcggaattaatacagtaacgaaggccatttggtcctggaccgtctggaaatacgtgcccaagatgtgagtctccttctttactcctcacttctgtacgtgtcatattatgactcacatccatcttttctttcacacttgctgacataactggttttgtaaaactaggccatccacatccactatcaaatttgtctagagaagtaaatagcggctcacctgaaacgatgtctacataaagaccttcctctttatggttccaatactcatttcgaaatggtggttctgtaccattttcctgcgttacataaaactgcatctcattgagtttttcttttaaatgagcagtatcctttggccaatgttgcttaataaaagcatctcgtcctgagcctttacgatataactcatagcggaatgtgtttttcttatgatatccttggtgatattcttcagctggataaaatgtagctgctggtagtatttttgtcgcaattggttttgaaaagcgtccactctgctcaagcccttcttttgaggcctcagcttttttatgttgttcttcattatgataaaaaatcaccgtttcataagactgcccgcggtcgtggaattgccccccaatatcggtcggatcaatttgtctccaatatatatttaataactcctcatacggcattttatttgcatcaaatgtaatttgtactgcctcataatgtcccgtcgtttcagaacatacttctttatacgttggattctctttatgaccacctgtatagccagaaacaacctttataatcccttccatctcttcaaatggcgaaaccatacaccagaagcaccctccagcaaatgtagccaattctaccttttcatttacagccattacttcacccctattctatattctccttacagtatggcataagaaacataatgttataaaagaaaaagcatcgaacatcgatgctttttctctacttcactttattttttccaacatccttctccatttcatcacttgtcacgtctaaaacatctagtaagaaaatgaagattggaataccgataatcagtccccatacacctaagaagtgctctgagaaaattaataccataaaagtatagaaaatcggtaaatttgttttttgcgacataaacttcggatttaatacgtaactttcaagcgcatgaatcactgttacgataatcaaaatataaacaacgtacataataccgccaatattataagcaatcatacaaagtgggaataaagaaatgataaccccggctactggaattaatccaagcaagaaaatcattaatgctaaacctaataattgcggaaatcctaatatccataatgcgataactgaaagaacacagttaacaacagcaattaaaaattgcgcttcgattacctttccaaatgaacgtgcaaatttctttccgaagtactcaatttcagtatagaaaattgcaagcctgctttctttaaactttgcagtaaaaccgacaatacgagatttttctaataagaaaaacaaactcaaaattaaagaaagtaaaacttgaaggccaaatttaccaacattcgtaattgatttatacaaaatgtctacgccttgtcctacatatttagaaagctccatatgattgacagcattaactgcatacttaattagttcactatctggtgggtttcttaaaaatacattgaattggtaaatcaattgtgaaatttgtatcgttaatactggtaaatatttaaatagcgtaatggcaattccaccaattaacattacatatagaaacgctataataatttttcgattaataggcatgaaatgatctaatttgcgggaaataaacttttggaatcgatccattaaatacgtgagaataaacgtaattaatattaaattcaacatactttgcagcccgtataacacgagagcaagtattactaatacgagtaacctctggaatcctttactttgaaacaggttttttatttgcataatcgacgaatactctctcctgtcctataaactaaaacgttaataagtagatttctctcttttttctacttttaattattattcatattaagatttttataaactcattatatgcctaccttaacaggtatatagtagcttacttcttattttacaatacaatgacctaattcaaaacgtattctacatagtattaatgaagatttaaggaaacttacatttttttaaataggtcttaccactactgtaacataaaaagcaagctatcagtagaaatctgtcctacaaatagcttgcttttcttattttttaagtaagttttactatccaatgaatggtatgaacattgggatgacaactactgttacaactccaactaccgttacagcaatacttgccatcgctgcctctacctcacccatttcaattcctaccgcaactcctaatgcatgacccgctgttccaagtgctaaaccttttgcaatcggatgtttcactctaaatgtttttaagaataatgctcctaatgcgtatacgataactgcgttgaaaataactgcaaacgatgtaattgctggaataccaccaatactttctgaaattggtaacgcaattgctgttgttgctgcttgtggtagcattgaattcattactgctgtatctaaaccgattgcttttgcaacaatgaacacgacaattactgagcaaatagatccaaccacgatagctgataaaatttgccaccaatattttttcaacttatcaacttgtttatagagtgggatagcaaatgcaattgttgctggctctaagaagaaactaatcatttttccgccagtattatattcttcaaaagtaaagttacctacctttagaaagacaatccctaataccatcgctacgaataatggtgtaaataggaagaacccttttgaatgcttgaataataatgttccgattccgtatgcgattaatgaaacgacgattccgaaatatggagtcattgtgcttgccatgttcattacctcctaacaatatataaatgcaatggttacgcaacctttccgtgcttgcgtcctttatttactactttcaattcttttgtatcttctgtttctttttcatcttttcctaaaataaattgtgcaaataaccctgttacagcaagtaaaataactgttgctacaacaattacagttaaaatttgtacaaagtattgccccattacaccaagagaattaataactgaaatacctgatgggacgaataagaatccaataatacctgttaaagctgttccgagtgattcaacttgctccaatttaataacttttaaacataatagactaaataaaataactaacccgattaccgatgaaggcattggaattggtaaatgtgttgcaataatattagaaattaacataatagctgagaatatgaatgcttgtgataagaaactatatacttttttcgtactcattttggccacctctttcgatttggtacctttattgtataggatacaaacgtataagtaagcgtttacataacagaacgtcaaatatacagaatcagttacaaatataaaaggatgaaatacaaaagctgcttcttaaatacgaagcagcttcttgagttcttttgcatatgtacggctaacaggtactttcgatccttctttcatgattaaattataagtagaattaaaccatggctgaatttcagtaatatgattaatattcgcaataaagctacggtgtacgcgcatgaagcttgcttgtggtaacttcttctctaaaattacaagtgtatcatgtgttacatacgtttccctcgttgtttttactgttactttcccatctacaagccctacatatataatatcttcaatattcacaagtacgattgattcttcaattggtaatgctaatttatgcatctctgctgttacatctgtcccctttatttcgtgcttcgtttctatttgcgcttgtttttgttttttatacttctttaatgtctgcacaatacgctcttcatcaaatggttttaaaatgtagtctaacgcatctacttcaaatgcttgcagcgcatattgatcataggcagtagcaaatacaattgcaggtggatttttcatcttctttaatatattcgcgatttcaaatccgttatcatcggataattgaatatctaaaaacacaatatctggtctactttgcattagttcttctaatgcgtcttccacacaatcagcctcaccaattatctcaacttctttcgttctctctaataaatactttagttcatcacgtgctaacatttcatcgtcaactactaatacttttaacacccggctcttcctcccctactttttttggaataataaaggtaatctccgtccctttatttaattcactttcaatatgaagcatcgtttctttcccaaataacccaataagacgttcattaatattatataaagctgttccagtccctttctttgacgaaactaccatctttcctaattgttctaaacgttcttcctcaattccctgtccattatcttttacttcaaagtgaaccataccctctttttcaaaaacatgcacttccacttcgcatactggttgcttcttcggaaaagcatgtcgcaatgcattttcaaccaatagttgaagaacaaatggtggtactaaagttgtctttagctcatcttcaatatacatctttacctcatacttatttgggaaccttgcttgttctagtgataagtatgcctgtacatggtttaattcttgttctagtggaatcaataactgacgtgccccttgcaaattacaacggaaatatacgctaagctgtaataataacttccttgctttttctacatctgttcggcatagagctgatactgtattaatcgcattaaataaaaagtgtgggttaatttgcgcttgtaatgcttttatctccgcatcttgaagtaatttactttgcaactcagcttctcctaactctaactgcgtggagaatatttttgctaacccttctgctaattcctcttccacacgacttaactggttaggatttttgaaatagagttttaatgtccctatcgtatttccatgcgaagttagtggaattacaatcgccgcttgcaaagggcagccttcatgttgacaattaataacctcacgtgatttcgctttcattattttccctgtgtttaacacttctttcgacaaaccggttattaaactatgtgaaggaatatggtgatctgatgctaatccaacatgagctaatattttctctgtatctgttaaggataccgcatctgttcctgtaaaacggtgaataatttgtgccacatgcttacatgattcttctgttaagccttggcggaaatacggtaacgttttatctgcaatacgtaatactttatgggtctgaagtgcctttgcattctcctcctgacgcaaaatagcttgtatcatagaaagtaaaataaaacttccaaaactatttacaagaatcattggtatcgctattgttttcacaacgctaattccatcctctataattaataaaatcattagcatttctaaagatacgataaaaacacttaaaactgctgaaaacttaggagtaattgtacgattatattttttgaaaatatatccaatataaccagttataatcccagctaaaatagaagagattgcgcagcttagcgctgtcgtaccaccaagcatataacgatgaataccagcaataaatcctactccaacccctacgatagggccaccaagtaagccgctaataccgacacccataatacgcgtattcgcaattgtacttgacgaagaaacaccttgtaaccagttttcattcataatcgtatttcctgctatttcaatcccagtgtaattgcttacaattgtaaataccgaaaaaatacaaataagcttcagcttatctacatagccatcctgtttatgaaggaggcgtctgaaagttttaatatgagagagtaaaaatcctaaaataactataagtccgactcgttcgatcatcatgagtactaaatttagcatctttgattcattcctttttatttagttagttttattatgggaaaataatgaagtcggcgtcaagaagaacgaaatgttttttgaaatattttacacataataacttcctctttatttgacaatacaatagaagagtgctaaaaataaagtaatataatacagtcctttaacccaaccccgtgaggttgagaaggaagtcggaatacaatatacgtatgttcttttttggggatacgtatgcttttttggccttctcatcatatcaggtgagaaggccttttgttattcttccatagcgactgtagaaaataaggaggagtaataatgaacgtcactactgatgtacaacaaacaacagaggagacaaaagcgaaaagatataaaacattatttggttctgcgctaggatatgcagcagaaggtttagatatgttgctattatctttcgtacttgtctatattttaaaagagtttcacttaagtcctgttgaaggtggaaacttaactttagctaccacaataggaatgttaattggttcttatttatttggatttattgctgatttatttggccgtattcgtacaatggccttcacaatcttactgttttcactagcaaccgcactcatttatttcgcaacagactactggcaattattaattctgcgctttttagttggaatgggagttggtggtgaattcggaatcggaatggccatcgtaacagaaacctggtctaaagaaatgcgcgctaaagcgacatctgttgttgcacttggatggcaatttggtgtactgattgcttcactccttccagcatttattgtcccacactttggatggagagccgttttcttatttggattaattccagctttactagctgtctatgtccgtaaaagtttaagtgaaccgaaaatatgggagcaaaaacaacgctacaaaaaggaactgttgcaaaaagaagctacaggtaaattaacaactactgaagcagaacaactaaaacatataaaaaaattcccacttcgaaagttatttgccaataaaaaagtaacaattacaacaattggtcttattattatgtcgtttatccaaaacttcggatattacggaatcttcacatggatgcccactattttagcaaataaatataactatacattagcaaaagcaagtggctggatgttcatttctaccatcggtatgctaattggaattgcaatctttggtattctagctgataaaattggtcgccgtaaaacttttgcaatctattatattggcggtacagcatactgtctcatttacttcttcttattcacagattcaacattattattatggggaagtgcattgcttggattctttgcaaatggaatgatgggaggatttggagcaattttagctgaaaactatcctgctgaagctcgctctaccgctgaaaactttattttcggtacaggacgtgggttagctggatttgggcctgttattattggcttactcgctacaggtggcaacctacttggagcattgtccttgatttttatcatctacccaatcgggttaattacaatgctactatgtgtaccagaaacaaagggaaaagtattagattaaacgtaaaagaggaagcatcttatttaagatgcttcctcttttacgtttttatttattttgatttactagccttctgaaataagaatgcagttttatcttcttcttttacaataccttgttttaatgctaattctcccgcaactttaggcgctaaccatagcattgggaataacaaaattgataccggaactgccgtcaccacgataaacgattgtagcgcattaatacttccttcacccatatataaaagaattgctgcaactgcgcccataataagcgaccaaaaaattcgcaaactaattctaggatctccgtctccagtcactgccattgaaatggaatacgccattgaatcccctgttgtcactacaaataaaattgttaataaaagaaatgctggtccaataatattagaaagtggcaattgtcctgtaattgcaatcatagctgccggcataccagattcacttaatgcgtccgagatagacccaggattcatcaactcataaaacacgcctgatccacctaatatagtaaaccaaaacgttgtaataataggtgcgataattccaattgcaacgatgatttctcgaatcgttctccctcttgaaattcgactcactaaaattgccatcattggtccgtatccaataaaccatccccagaaaaagattgtccaagatcctaaccaacttgtatcaccacggtatgtgctcatcggtataaactcatttacataaaatccaaacgaagaaacaaacgaatcaataataaatccacctggcccaaatagtaatatgaatgccattaatacaattgccaatctaacatttaaattacttataatttgaatccctttatcaatacctgttactgccgatatggtagacacggccaccacacaaacaataattgctaattgagtagtaaacacattagaaattccaaataattcttgtaatccataacttgcttgtaaacctaaaaatccaattgggccaattgtacctgcagctactgcaataattgcagctgcatcaattatcgttccaagcaggctctttcttaatttttccccaaaaataggatataaaagcgttcgaggttttagcggcatatctttatgataatgtccatacatcataactaccgcactaattgtacctaaaatcgtccatgctaaaaatccccaatgcatataactttgtgctaaagcaggcataactgcttctttcgttccagcagatataccatcatgtattggtggcaccgtcatcaaatgatacattggctctgctgctgcccaaaaaacgccacctccggcaagtaatgtagacataataatagcaagccattttgccgtactaatctcaggtttttctaatcctccaagcttaactctcccatatttggagaacgccatacacatcgcaacaataaatgtacctaataataaaacttgccagaaggcaccgaaatatttaattgaaaaagcgaaacttttattaatcgcactctctacataatccttgttcaaaaaaactgcaattacaaataataaaagtgaaccaccactaataataaatacaggccaatcagtttttcgactcttcatcctcatttacacttcctccttcctcagcaatctaaaaaaacaactttattatgttttattgtttaaaaccaaaacacaataattatatatgcataacattttatcgacttcccacatacttatgttgtccctaaaaatatgccaaatcccttattaaaaagaaagaatctcttcctcttacataaaaaagcaaaacaaaagaccttatatttctataaggtcttcgaaacagaaatttgattataacataaggaactccttggttcaaaaagcctcttccaaaaataaccgagagtaaaggcttccatttgctacataacagtaattaaaaaaattatatttcacagaaaaaaactacactaaatatcatttatgaaagaaatttggcttcaaaatttcattcggatacggtttatgataaatgtgggtggtagctggagataatggtggaataagccatacccaattacctgttacaacacgaccacaagcagcttcttgcttctcaaattgctgaaattgttgtgcagcagtatggtgatcaacaatactaactccttgttttttaaaggagtgtagtacggcaatattcaactcaattagcgccttatctttccataaggtaccgtttctcgatgtatctaaatccatcatctccgcaacagccggaagtaaattataacgatcatgatctgctaagttgcgcgccccaatttctgttcccatataccatccattgaacggagcggctgtataagaaataccgccaatttctaaacgcatatctgaaatcattggaacaccataccattttactccaagtgatgaaatagggtattctgggtgttcaattggcacttcttttacttcttctctcggaatttctttatatataggcgcttttccatctatagaaaacacaagtggcaatacatcgtaattcgtaccctctccttgccaaccaagctcctgacaaaagtccgtaaatgtagcggaatgagaatcaccaatcactcccgtttctgttttatatcctgcatatcgaatcaattggtgattataaattcttatattattttcttcaccttgatattgcttaaaaatcgtaatggttggtttaacttttccgtcgttcgttgcatatttaatatgatgaattaatgcattatatacaccctcttcatcatttacttcgcgcgcatctaatatgtgcatcttactccaaaatagtcttccaatacatctattactgttacgccatgccattcgtgaaccatgaacaagttcttcaaatgtatgctcatatgtccctgtcttctctatctcaatttgaatttcttttatacgttctgctatcaattgttctttatgaagctccttataacaaatcgtaataaaattacttgcttcctctattaattgtttcgttttactcataaacaatctccttctatttcaacaaaaccctgctactttacagtataagcaaaaaggataggagtcacaaatgaaagtgagagtgttacttttattgtaatatttttcagaaaattaatggaattactattgacttatatggaaaatgggtgtatttttgactcaggtaaagtatttttacctagaccaactttttaagtcgaaaggagggaatgttatgtcttcatttcaattgccaaagctttcatatgactatgatgaactagagccacatattgatagcaatacacttgccattcatcatggaaagcaccatgcgacatacgtaaacaatttaaatgctactttagaaaattatactgaattacataataaatctttagaagaattgctatgtaatttagatgctttaccgaaggaaattgttacagctgtacgaaataacggcggtggtcactattgtcatagtcttttttgggaagtgatgagcccacgaggtggcggtgagcctaatggagacgttgcaaaagtaattgattattatttcaatacctttgacaacttaaaagatcaactttccaaagcagctattagtcgttttggaagtggctatggatggcttgttcttgacggtgaggaactctctgttatgagtacaccaaatcaagatacgcctttgcaagaagggaaaatccccttactcgtaattgatgtatgggaacatgcttattatttaaagtatcaaaataggcgcccagagtttgttaccaactggtggcatacagtaaactgggaccaagtaaacgagaagtatttacaagcaattcaatcacaaaaacattagtcgtacgtataaggtaaatttggtaatgtaaaatcagtattgtcgaaatcctccagaatcccccggattgccaccgggggatttatgattacttcattgtatttatataatgttttaaaatattttttatttctagtttcagctctcggaacaaaaatccgaattcacgagcctttccattatgtaacgtacagttagttacctcattataaggagctatatttcccccagctttctgaatgagtgcttttattcctgtcttctcttctatgaaatgaataatttcttccatagaaactgctccgttactacaggcgttaattggtcctctcacatttgccattccgcaccaagctagaaactctcctgcctctttttcatgtataaatgacaaagttccatctacatgatccacaacgataggtttttggttcacaatacattcaacgtaaaattgtaaccttttcgtataatcattttctccaataacaactggaaaacgcactgcaacgactgggaatgttgcatgttgaaatacaacggcttcagctaatctctttccttcaccataattgaagtcattcctatctccatacgcgattgcatactcgtacggattaaagtcttcttctgataagcttagggcaggttcatagacggccattgaagatgtcataacatatttcttcgttttccctcgtaacacttcacatattaccttcgctgcattcgagctatagcataaattatcgtatacaatatcataacttttatctcctagacgctctgctagttgtttttcatcttccctatctacaataagtctttttactctactgccaaaagaatcttccgtaattcctctcgtcgcaatcgttacatcgtgcccctcttgcaaaagtgcttctactaaatgtttaccaaaaaatcttgttccccctagcaccaatacttttttcaacttcatcatccccactttagcaaattgtaaaatactacctctctattataagtgctaacatataaaaagcatggaattcgtttaacgattccatgcctttatacagataatatattaacgtactcgatatttataaatacaataacagaagtataaaatagaaattacagatacataaacccataattcatatacgaatccctctccccacactcccataaaataaaagagtgaaggtaaagtcaatgttacccatgattgtacgaaggcaatccttccaagatattgattaatgttcttcttttgtgtatttaatacaaagaataaataccaaagtaatgcccacataaaccacgttaacgcattaacaacatcatggaattgaacaaatgaaacaaccatatagaataaggctataattgctacccaaatacaaaaccatcctagaccactactatccattccttttataaaagtaacacctacatataaataagttaatccaaataagaaagtagccgcatatgaatacactgtccaattgctttggtcagaaatcataatcaaataaaacggaataataatttgtagtgcacccacaaataaattaaaaacacccgcacttttcatctctgctttccctaatataacaagactatttaaaaataaagctgcccctgaaagtaataatcctacataacccatatatattcgtgtgaaaatctttacctttcacacttttaacctccccacactataaaatgatacttatattatttttcttcccatttaaaactacatacataatttttcacctaaataagtcagacctcctacctcaaaaaaggagtgaacttaaaacgctttcaataataaatactcctatcaaaacatgaactaggattccttgattataaacggactctagcaatgatacaagtgttggaatacatttcaataatacgctttcaattcccataaaaaattaataaaataatacattactctatctcattctactaccttctagcataagatattgtaaaatcatatcatttaaaacagcgaacgttcttttctaggttcgctaataaacttagtagaaaatgaatataaaaaatgacctcttgcttttatgcaaaggtcattttttatattcatcattaaacttctaaatagccatttttattatttgattgccatttccaagagtcagcacacatttcttctaatccgcgtgttgcctcccagcctaattcacgctttgctttcgatgcatcagcaaaacatactcggaggggtagcgaagtggctaaacgcggcggactgtaaatccgctccttcgggttcggcagttcgaatctgcccccctccaccatttacataggggcatagtttaaaggtagaactgaggtctccaaaacctccagtgtgggttcgattcctactgcccctgccaaatatatttacacaacatggcggttgtggcgaagtggttaacgcaccggattgtggctccggcattcgtgggttcgattcccatcagtcgccccatttttattttaaaaattacaaataatctaatggatacttacatataattaagtaagaattcgatgggctatagccaagcggtaaggcaacggactttgactccgtcatgcgctggttcgaatccagctagcccagccattaagagccattagctcagttggtagagcatctgacttttaatcagagggtcgaaggttcgagtccttcatggctcaccattttaataaatatgcgggtgtggcggaattggcagacgcactagacttaggatctagcgcctttggcgtgggggttcgactcccttcacccgcacttttaataaaataactcatacatgtcttgcggaagtagttcagtggtagaatacaaccttgccaaggttggggtcgcgggttcgaatcccgtcttccgctccaataaaatttaatatggcggcatagccaagtggtaaggcagaggtctgcaaaacctttatcaccggttcaaatccggttgccgccttttcttttgtgccgatgtggcggaattggcagacgcgcacgactcaaaatcgtgttccttcgggagtgtcggttcgaccccgaccatcggtatcatgaacggcgtaaaaaagctctatacaattagtatagagcttttttgttttcttttcattacatgacaaaataagcagaaaaagtattgtatatacaatatttctttcgagtactctagagagaatttctccaccccggtgacatgaagttaaatccgataccaccagtagatattagtacactatcaacggttaagtttgtaatctctaaaaacttcttttcaaacccttctctgttgtacttatacatagttgagtggcacgcccacatatgcgttgaagtacttaaccagtcccctaaatcttttaattcagggaacgactcaaattgaattggttcatctaatttcatgaatctcacttgatagatagttgggtttaacttttcttctatccctttaagactatgtgcttttttctcatttgaatgtgtcataattctccttctctcttttcttcaaatttttccctatttttattatacaacaatagaaagtaattatgggaataggtgtcagcaatataaaaagactctaacagaaatgttagagtctttttgttaaattatactatgtgcttctaaaattcgtaataaacgtaggaattcatgtataatataacttgtcgaaagaacaaaatgatagtgatttatattatgtctataatatgaatcaaaaatgaactttttatatttcttttaaaaatgtgttgaacacacattatatttcatattaatatttttatgtagatttaaaacgggaaagagagtggaaagtatgggccgtaaatggaacaatattaaagacaaaaaagcatcaaaagatgcaaatacaagccgtatatacgcgaaatttgggcgtgaaatttatgtggcagcaaaacaaggcgagccagatccagaatcaaaccaagcgctaagagttgtattagagcgtgcgaaaacatacaatgttccaagaacaattattgatcgtgcagttgaaaaagcaaaaggcggttcagaagaaaattatgacgagcttcgttatgaaggattcggaccaaatggagctatggttattgtagatacacttacaaataacgtaaaccgtactgcagcagatgtacgagctgcatttagcaaaaacagtggtaatatgggtgtgaacggttctgtagcttacatgtttgatgcgacagctgttatcggccttgaaggtaaaacatcagatgaagttcttgaaattttaatggaagcagatgtagatgcacgtgacattctagaagaagaagattctgttatcgtgtatgctgaaccagatcaattccatgcagtacaatctgcacttaaaggtgctggcgttgaggagtttacagttgcagaattaacaatgcttgcacaaagtgatgtaacacttcctgaagatgctcaagcacaatttgagaaaatggttgatgcattagaagatttggaagatgttcaacaagtttatcacaacgtagacttaggagagtaatacgatagatgacccttttcgcttagcggatagggtcttttttatgaagttaattaaggtgatgaagtattaaaggtattttgttgtaggtagtgaatatgattatagggatatacaaaatattcattatctctaggaggcttaatatggaacataagacaccaaagcatatagttgctgtagcaggttatttaacaaatgaaaaaaatgaagtgttattaacaaaagtgcactggcgagctgatacgtgggagttgccaggaggacaggtagaagaaggcgaagcgctcgatcaagctgtctgtagggaaataaaagaggaaacagggttaacggtgaagcctatcggaattacaggggtttattataatacctctatgcatattctagctgttgtttttaaagtagcatatataagtggtgaaataaaaactcaacccgaagagatacaagtgggtaaatttgttgatttaaatgaagagaacatagatgagtatataacgcgtcctcatatgaaatccagaacgcttgatgcaatgagagcaacacattttattccgtatgaaacgtgggaagtacagccgtataatttaataggaagattgtaaagaaaagagtagccgatttgagatacattcgaatcactactcttttttgtatactgtttaagaaaaaggtcaaaataataatagcactagtattgatttgcagaacatttgttctgtataataaatctatatgttatatacatttagattactagatagtcaaaagtatatatatttgtagatgatataattaaagtgtaaagtgaaaatataatagtcttaagggtttctcttttattggttattcgtgctttaacataacctatattcaatatttcagatgaatagtagataaaaaaatactgtgatacaatacttttttatcccactatttgctgggcagtaagcttgattgatgagggctcattaaagtttcactttataccttacaatgatgtaaggtacgtgtaagagaaatcgatgggatatttttttacaacaatgtattcttaaagtaagagttatatgctgtgtggaaaagaggtgttcaagatgaaagaacgagtattatctagggtgaactatcatcaaaaagttgcattaaatccaatgactaaacttttttataaagccattatattattattattgttaagttgtacgttattattcgttggaaatgtaatgattgagaaaagtgatattagtaaattacatgtaccggctaagttagaggtgccagaatcattaacacatgcatttattgcgacagaagataaaagattttatcatcataacggtttagattatatagcaattattagggcctcagttgagaatataaaggctggtggtgtcgtgcaaggaggaagtacgattacacaacagctatctaaaaatgcctttttaacaaatgaacgtacattttctcgtaagtggaaagagattttttatacgaaaaaaattgaacgcacatttacgaaggatgaaattttaaaattatatgtaagtaatatttattatggagaaggagcatggggaattgaaaaagcagcaaacctttacttcggtaaaaaggtgaaccaattaacgttggctgaaagtgcaatgatggctgctgtagtaaaagcacctgcttattactcacctgcccaaaactatgataaagcagtagagagacgaaatgtcgttttgagactaatggagaaagaaggctatataagccatgatgagtatgttcaagcagttagtgagaaattagtaattcgtcatgatataaaaatagagcagtcgatgttaaatagcgcgcgtaaaaaagcagtaagttaagagaagttcctacagaggagcttcttttttttgaataaattgtgacaaattgtgacacaatatcgtcacaattattgtgtttttgtaatttatgtgagcgtgttcattgcgtgacgtatataagtgttgatattatgtgtattgtgtacaatgctgtatacagaatatgaatttaaagaggaatgtatatgaaatcaaataaactcatggctcttggtatagttttttctatcgcagtattgattgtaattggaacaattgcgtatagcatcataaatgacaaaaaagataaagggaatgagatgtttgcttattctacgcaacaatctttagggaaagatgatgctccagttaaggtagttgaatttggagactttaaatgtcctgcttgtcgtacttgggatgtaacggtattacctcgattaaaagaagagtatattgataaaggcaaagtgcagttatattttattaacttcccatttatcggaaaagactcggatttaggtgcagcagctggtgaagcaatttataaacaagataaagattcattctggattttctatgatgagatttatcaaaatcaaaagaaagatacggaagaatggattacagaagatttgcttcttagcattgtgaaagagaaacttccaaaagttgatgtagagcaatttaagaaagatttacacagtaaagacattaaagaaaaagtacgtaaagattcagatcgtgctcaaaaattaaaagttcaaggtgctccttctgtatatgtaaacggaaatcttgcaaaccctgatttcgatagtatgaagaaggcaattgataaagaattgaaaaagtgatgaggtctctcatcactttttcgacttttttcgataaaattcttgcctctactttttttacatgctatactactttacataagttattctaatatcttatatgtaattcatatttgcgggtgtagtttagtggtaaaacaagagccttccaagctctggtcgagagttcgattctcttcacccgctccaaattttattaaatgtttttctataaattgtgatcaacgcagtgtttcgtttccgagataaacgaggcattgcgttttttaatgtttgaaaaacctaattacatgcgaaaatagaagtaaataatagtattccaaaagtgaattactaaccaatagggtcgttacataagggatggattcatctgaggaggcgattaggaatggattttgaacaattaaagcaagatgtaattgcgtatagtaaaacaattggcatagataaaataggctttgcgagtgcttctccttttgaggaattaaagcagcgcttaatccagcaacaacaattaaattatcaatctggatttgaagagcctgatatagagaagagaacgaatccgcaactgttattaccgggtgctaaatcaattattgcgattgctttagcatatccttcaaaattaaaaaatgcaccattaagtaagcgtggagaacgccgtgggattttttgtcgtgcttcttggggacaagattatcatcttgttttacgagatcgtttgcaaaaattagaagcatatttaattgaaaaacttccggatatagaagtgaagtccatggttgatacaggtgaattaagtgatcgagctgtatcagagcgtgcaggcattggatggagcggtaaaaactgctctattattacacctgaatttggttcgtacgtatacttaggggaaatgattacaaatgttccattcccgccagataagccgatagaagatcaatgcgggggctgtacgaaatgtatcgatatttgtcctaccggtgctttaatacaggggggacagttagattcgaagaagtgcattgcgtttttaacacagacgaaaggattcctacctgaagaatatcgcgataaaataggaaatcgtatatatggatgtgatacgtgtcagactgtttgcccgaaaaacaaaggaatggattttcataatcatcctgagatggagccggatcctgagctagttaaaccattattaacaccacttttaacaattagtaatcgtgattttaaagagaaatatgggattatgtcaggatcatggagagggaaaaagccactgcaaagaaatgcgattttagcattagcacattttaaagaaacatcggcaattcctgatttaattggtgttatgaaagatgacccaagaccagtactacgcggaacggcagcatgggcacttgggaaaattggcggagatggagtaggcgaagcgattgagaaagcgatggaacgtgagaaagatgaagaagtgcttcatgaaatgaatcgcgggcttgaattgttagcacagaaaaaagagtagataatatttccctttttcatattgtaatatgggagggagacagaatggttgtaaaaacgaagattgaaaaccaagtacaacaatttttagcatatataacggagaaaagaacgaatgtggatggtattgctgaggatttactacaaatggcactgagaaagaaacaattgtttcaaagacgtagtgcacatatagtgaaagcaactgcggatgtttctttcattagacaattaaatagtaatgaccatcaagaaattgattatcaaatacattttaaatatttaattaagcataaagaattattttatattgaagaggaacaattaaaacgaagagtttgtttaaataatagtcgaattataggcgattatgctattgaagtgtcagaagaaattagaatgggtgagacattagaaagggaaattacgaaagagaagtacggttcttatcagtataatcgtttagaggcagtgaaatatgcagagcgttggtgggatgaccgaaatcctatgtatcgtaatttccctgataattgtacgaatttcatttctcaatgtcttcatactggagaagtacctatgagcggatatcctaatattcgtaaaggatggtggcaaagggagaatcagtggagctggagctgggctgttgcacattctttttattggtatttgtcaggtgctacaacaggacttcgagcagaggcggtagagaggccagaagaacttattcttggagatgtcattgcttatgatttcgaggatgacggaagatggaatcatacgacgattgtagtagcaaaagatgcagatggtatgccgcttgtaaatgcacattcagcgaatagccgtcgacgttattggaactatgaagactctagtaaatatacaccacaaatgaaatataaattctttcatattattaatgggtagagatttttcgctcaagtggtataatacgtagtagacaaaaaacagaggtgaatatcgcgtgggagtacatgttgttttatatcagccagaaattccagcaaatacagggaatattgctcgtacttgtgcagcaactggaacagaattacatttgattagaccgcttggattttcaacggatgataaaatgttaaagcgtgcaggattagattattggcagcacgtgaaaattacgtattatgattcaattgaagaattttatgaaaaaaataaagacggtgaattcttctatttaacaaagtatggcgagaaagctcatacagcgtttgactatagcaagcgcgagaaggattactattttgtatttggaagagaaacaaacggcttaccagctaatgtaatcgaagaaaactttgatcattgtttacgtattccaatgacagataaagtacgttcattaaatttatctaatacagcagcaattttaatttatgaagcgttccgtcaacaaaattaccctggattagatttagaaatcgtttattaaaagtcgccatatggcgacttttttttataaaataaaaataatatataatcatacatttaaaagagaggacataatcatatagaatgggatatatgattaaaaatagataagacgggttgagataaatatgaaggaagaatatagtaatcaaaatacctttttaagtatgatagatatggatttaattagacaaggattattacatgctattcaagatttagtattcatattgaaagttattgataatgaaacgtttcaatatatgtatgtgaataaaataggaatggattatgctaggttaagcgaagagtgctatggaaaaacctttgcagaagtattaccaaaagatatagcggggatattgcaaaggcaatatgcaaaagtagtgagagaagcgaaagcacacaccttttgtgatgtagtcaatttaccaaaaggtgagatacactatgaatcttcacttaatcctgtctgcgacgaagaaggaatatgtcaatttgttatttgtattacaagagatattacagctcaaattgaggagaagacagagatagaggaaaaacaaatgttatttaagtcgttactggaatataataatgactcaattatatctatagattctatagggagagttacatatgcaaatccggcaacgtatgaaatatttggataccggtatgaggaattaaataataaatttatttttgaattcattaataaagaatatgaaaaagattttcaaattatatttaagggatcgatgcaaggaaaagcaaaacaaattgtttcaaagaaatatgttcataaagaagggtacgagctatatatttctttgagaactatcccgattattgtgaacggtgaaattgttgggatttatattgttacgagagatgttacaaggcaagtattaaacgaaatgcgaacagaatatttagcttactatgaccagttaacgggattaatgaatagaatttcatgtacaaataagttaaatacttttttaaatgagagtgtaaattttgcacttgtatttatagatttagatgagtttcatcgtattaatgatacatttggtcataaagagggagataaagtattacaaaaagttacagaatgtttaagtaatctaaaaatagaagatatgcacttatttagagaacacgatgatcaatttgttatgttgatagaaaatataacgaaagaatatgtagaggaagttgcaaaaagcatattaaaaaacattagtgaatattttgtaatcgaagaagaagatgtatatttaagcgcgtcaattggaattgtaatggctccaacagatggagaagatgaaaaaatactatttcagagagtcgatgctgctttagaaaaagcaaaagaaaaaggaaaaggacattatcatttttattgtagtggattagactgtgagcgtgaacaaaggtttataatagaaaaccagttacatcgtgctatagaaaaaaatgaatttttcttatattatcagccacaaattaatattgaaacgaaaaaaatagctagtatggaagctttaataaggtgggagaataaggaattaggatttgtttctccaaaccaatttattccgttggcagaaagaacaggatttattattaagctggatgaatgggtagtaaatcaagtgtgtcagcaattgcgcgaatggttaaataaagggtatgatgtggtcccaattgcagttaatatttcagctagacactttcgttctattacattaatagagatgattacacgggctttaaataagtacaatgtaccaactcatttattagcgatagaggttacagaaggagctcttatacataaagatatatcgaagagagtgttactacaattaaaagagcaaaatttaaagattcatttagatgattttggaacaggctattcatctttaagttatttaaaaacatatccaattgatactttaaaaattgatcgttcttttatggaaggtatacatatagatgaacgtgatacgaatattacagctgcaattattcatttagctcatactttagaattaaatgtaattgcagaaggagtagaaaaaaaggagcaaatacagtttttgaaagaaaagaatgtgaagcttgtacaaggttattattatagccgaccactatccaaatatgatatggaaaatatgtattataaataaaaaaaatgatgtgctaaaagcacatcattttttatgtgtacctggtttgtcattgtaaccggatgtaaaaatagctgtaagaaatgtgagtgatacacctaaaattaataataatttcatactaatatcctccttacttttttcggttcatgagttttatttattacccaaaatgtatgtaaggttcttagaagaaaagaatttatttataatgaatagcagtgtaaaaacgttaatacctatattatacagaattttctttgaattttggagagaattttagtgtgctattatatatttcgttttgatttaaagaatgtttaaggacatcctagcataccttttataataatccgattgaacaaggagatgggggaggagctataatggatattctaaaaaagattgaacagcatcgagcagcagaagaacgtttacaatgggaaggtacgtttgcagagtatttggagcttgtgaaagaaagaccatgggtggctcaaacagcacactctcgcatttacaatatgataaaagatgctggaattgaagaagttgatggtagaagaaagtataacttctttagtaatcagctctttggattagaggatgctctagaacgtcttgtagaggaatattttcatccatctgcaaaacgattagatgttagaaaaagaattttattattaatgggtcctgttagtggagggaaatcaacgttagttacaatgttgaaacgaggattagaaacatattcaagaacagatcgcggagcaatttttgcgattaaaggatgcccaatgcacgaggatccactgcatttaattccacatcatttacgagatgatttctttgatgagtatggggttagaattgaagggaatttatcaccactaaatgtcatgcgtttagagcaagaatacggatcaagaattgaggatgtagttgtagagcgtatcttcttctctgaagatcgtcgtacagggattggtacatttagcccgtctgatccaaaatcacaggatattgcagatttaacaggtagtctggacttttctacgattgcagaatatggttcagaatcagatccgcgtgcgtatcgatttgatggagaattaaataaggcaaaccgaggaatgatggagttccaagagatgttaaaatgcgatgagaagtttttatggcacttattatcacttacgcaagaagggaatttcaaagcgggaagatttgcgcttatttcagcagatgaattaattgtagcgcatacgaatgaaacagagtatcgctcatttatagcaaataagaaaaatgaagcattgcactcaagaattattgtaatgccagttccttataatttacgagtaagtgaagaagaacatatttatgaaaaaatgattcgtgaaagtgatgtatcgaatgttcacattgcaccacacacacttcgcgttgcagcaatgttcaccattttaactcgtttaaaagatccgaagcgtccggatattgatttaattaaaaagatgcgtttgtatgatggggaaacggtagaaggttataatgcgattgatgtagaagaattacaacgcgaatatcaagatgaaggtatgaagggtattgatcctcgttatgtcattaaccgaatttcgtctacaatcattcgaaaagaggtaccatctattaacgcgttagatgtacttagatctttaaaagatgggctagatcagcatccatccattagtaatgaagaccgtgaacgttacatgaacttcatctcattagcgagaaaagaatacgatgaaatcgcgaagaaagaagtacaaaaagcgtttgtttattcatatgaagaatcagctaagacgcttatggataattacttagataacgttgaggcgtactgcaataaatcgaaattacgtgatccgttaacaggagaagaaatgagtccagatgaaaaattaatgcgctcaattgaagagcaaattggaatttcagaaaatgctaagaaagcgttccgtgaagagattttaattcgcatttctgcttatgcccgtaaaggaaaacgctttgattataattcacatgaacgtcttcgtgaagcgattcagaaaaaactatttgctgatttaaaagatatagtgaaaattacaacgtcaacgaaaacgccggacgaaaatcagcttaagaaaatcaatgatgttgttgcgcgtttaattgatgagcatggctataattcttcttcagcaaatgaattactacgctatgtaggtagcttgttaaacagatagtttgataacaaaacgctgtctcttgtattttgcgggacagcgttttattatccgttcatatgtgtataaagtgtcataccttgtccaaatgtaataaattaagatgcaattttatgaatttattgtcaattatttttacaatatgcatatgatagagtaaccaaccattcatacgaaaaaagccaacacaatacaatatgttgcaaagtaaaaatatgtgcaacaatgcattgtgtttctttcttatcagtggctgaatatttctttctattatgtgagtggcaaaattttgtttaggatgctcggggtattgtatgaaaaacgttataaatgtttatgggatgattttctgtgggcagttacctttcaaacattctagcttgcacattacagaacaaaatttatagattgctgttcatacaggaagacaattacagtaaggagggaaaggaatgggcgaagaaaatcaaccaaattatacgatttcacaggaaaactggtccctccatcgcaaaggatatgacgaccaacagcgccatcaagaaaaagtacaagaggcaattaagaataatttacccgatcttgtaacagaagaaagtatagttatgtctaatggcaaggatgttgtaaaaataccaattcgttctctagatgaatataagattagatacaattatgataaaaataaacatgttgggcaaggaaacggtgacagcaaagttggtgatgtcgttgcgagagatggatcaggtggtcaaaaacaaaaagggccaggaaaagggcaaggagcaggagatgcagctggggaagattactatgaagctgaagtctctattttagaattagagcaagcgtttttcagagagttagaactgcctaatttaaagagaaaagaaatggatgaaaaccggattgaacatgttgaatttaatgacattagaaaaacaggattatggggaaatatcgataagaaaagaacaatgatatccgcatataaacgaaatgcaatgagtggtaaagcatcttttcatccaattcaccaagaagacttaaagttccgcacttggaatgaagtattaaagccagattcaaaagctgttgtattagcgatgatggatacgagtggatcgatgggaatatgggagaaatatatggcacgtagcttctttttctggatgacaagatttttacgcacaaagtatgaaacagtagatattgaatttattgcccatcatacggaggcaaaagtagttccagaggaagagtttttctcaaaaggagaaagtggcggaacgatttgttcttctgtatacaaaaaagcactcgaacttatcgataataaatattcaccagaccgctataatatttatccattccatttttcagatggtgataatttaacatcagataatgctagatgtgtaaaacttgttgaagagctaatgaagaagtgtaatatgtttgggtatggggaagtgaatcagtacaaccgccatagtacactcatgtcagcctataaaaatattaaagatgaaaactttagatactatattttaaagcaaaaagcagacgtatttcatgcgatgaaaagcttttttagagaagaatcaggtgagaaaatggcataacctcttttaaagaggttctttttttgtaaactttttattttcctagttgacaatgataatgaaaatcattatcgtttattcgagaaatgattacatttcgaattatatatttcggaggagatgtaaagttgaaacaaaataaaagaaaacgtataaatgcaatgattatagcggcagcgttatcacttccgtttgctgtttattcaacacctgctttagcggcagtagcaattgaggcgaataaaactggacaaggtttagaagatggtacatatgatgctgttattaaagcgtataaagataaaacgaatgaagagtctatggcagctgtttatataaaggatccgaaattaacaattgagaatggaaagaaaattgtaacagcaacattaagtgatagtgatttctttcaatacttgaaaacagaggatattcatactccaggtgtgtttcatgatgtgaaagtaatatcagaagataaaaagaaaaatggaacgaaagtgattcggtttgaagtaggggaattaggaaaaaggtataatatgcgaatgcatatttatattccaacaatggcctatgataataagtaccaagtacagtttgaagtaaatacattgaatttagagaacaatgttccagaaaaacaaaaggaaaataaagaggataaagtggatcaacaagatggaattggaaatgtaatagtagataagcaactacaaaggcatattaataaatataatttgaatagagaaaatctagataccccaataactaaggaagatttattaaaagttaaagctttaatagtcgttgaagctaaaaataaaggaatacaagacgtaagcggtctagaatatatgacgaacttagaaaacttaactttggaagaagttaagttaaaaaatataaaatttatctcgggattgagacaattaaaatcattaagtataacctatggtgaacttgaagatattggacctttggctgagttagagcatattgagtttttaactttgagaaacaataaaatctcagatttaagcccattaagccaaatgaagaagattaaaatgctagatttaaatagtaattatataaaagatattaaaccattatttacagtgaaatctttaaggactttgactgtggcaaataatcaaattagtaatgataaccttgctggaattgagcaattgaaaaatgtaaaaaacttatctttaagtaacaatggacttacgaatattgaacatattacatcaatgaaaaaattagtagagttagatcttgctaaaaatgaattagaaaacatcgaacctttatcaagattatctactgtacaatcacttaatttagaagaaaactatatttcagatataacgccacttagtcacttaacagacttatatgatttaaagctaggttcaaatgaaattcgtgatgttagacctgttcaagagctaggaaaaaggatatatatcgatattcaaagacaaaaaatctttttagataatgtagaaaaagataaggaagttaaaatacctatctataatttacaaggagagccacttgatactattcaattgaagagtgaagatgggatagttaataatggttctgttaaatgggggactactggtgaaaaaatatatgaatttacgttggatataaagccagaagagaatcgtattaagtttaatggaacagtaattcaaaatgttgttgaaagattagacgaaatcaaggaaacaataaaagaggataatgaacaaaaggaaaatataattctcgataaaactttacaacaacatattaataaagagaatttaggtagagagaatttaaacgctcctattacaaaagaagatttattacagattaaaaaattagagatatttaaagaaaatggaaatgagataaaaaatataacaggtttagagtacatgacgaacttagaaaaactcactttagaaggagtaggcctgaaaaatattgagttcatctcaaacttgaaacaattgaataatgtgaatgtatctcataatcaaattgaagatataacaccactatcttcattggaaaatttacagtggttaaatcttgcggacaatcatattaaagatgtaacggttattggttccatgctaaacttatttagcttaaatctagctgggaatgagattcgtgatgtcaggtcgttaatacaattagggcagtggtttacaattgatgttggaagacaaaatatcattttaaatgatgcaaaaataaacgaagaaattcaagttcctgtatatgatttagaaggagaaagtattgaaaatattcaattgacaagtgagggagggacgtttaataacggagtaataaaatggaatacgccaggtgaaaaggtgtataaatttgatttagattctgatgaaattagcataaggtttaacggaacagttatacagaatatagtggaaaaagaagaagtaaaagaaccggtaaaagaagttgaagaagcaaaagaagaagtgaaagaaccaacaaaagaagttgaagaaacaaaagaagaagtgaaagaaccggtaaaagaagttgaagaagcaaaagaagaagtgaaagaaccgataaaagaagttgaaggatcgaaagaagaagtgaaggaaccggtaaaagaagttgaagaaacaaaagaagaagtgaaagaaccgataaaagaagttgaaggatcgaaagaagaagtgaaggaaccggtaaaagaagttgaagaaacaaaagaagaagtgaaagaaccgataaaagaagttgaaggatcgaaagaagaagtgaaggaaccggtaaaagaagttgaagaaacaaaagaagaagtgaaagaaccgataaaagaagttgaaggatcgaaagaagaagtgaaggaaccggtaaaagaagttgaaggatcgaaagaagaagtgaaagaacctgcaaaagaagttgaagagccaaaagaagaagtggacgagctaacaacaggagttgaagagtcgaaagcggaggggaaagaaacaggaaaagaaattgaaggttcaaaagaagcagtaaatccatccgaagtagtccaagaacaaaacatgaatcatcaagttgtgaaagaaaataaaccagttgctaataaacaggaagaaagtaagaaatcattaggagcaacaggtggacaagcgaatacatcaaagttactttcaggcgtagtattagttctttcagcactgagtatgtttgtatttagaaagagattatttaagaaataaataacgtgttatcttattatattgtaaaataattgtataagtttttgagaagacattatcatggcagtttcattttgaaataggcttatgataatgtcttttttaagggggatataaatggaaaaggtgtcggagagcagttattacaagttgcaattcagtatattttctccttccaagggatgagagagatagtactatgtttgaatacgaataatgatcgtgcgatgaaattgtacaagaaagtaggctttgaggaaaaagcatgtttacaacactatataatagagtgaaaaacccattcatatgaaaatgatatttcatatgaatgggttttattacggatttagaagtgatttgaggcgccaatcgttacataaccttttttatttttttcggcacttctttcgtttgcaaattaacatcttcttttcgtagctctttaaagagtgaagtaaccataagaacgactacaatagaaaatggtagcgcagcaattatagctgcgatttgtagtgcatttaatcctccagcttgtaataaaatagcggcaattatcgcgattgttaatccccatataagttttaaactatttttcggtgataaacttccgttactcgtttgcattgaaacaacaaatgttgctgaatcggcagaagtaacgaaaaatgtggctactaaaattaacccgataatcgttaaaaatgtagagaatggtagatgtgaaataacagcaaataatccaatctctgtaccattttttgcaatttcatcagctattccaagcgattggaacatttccatatggattgcggtaccaccaaatactgcaaaccaaaatgtacagataagagtcgggactaatacaactccaaaaataaattcttttattgtgcgccctttagaaatacgagcgatgaatgtaccgacgaatggagaccaagaaatccaccatccccaatagaaaatagtccagttttcaatccaagaagaagatttttcattaaatgctcctaaatttaatcccatactaggtaaagcgccgatataagaaccgagtgtagatgtgaaatatttcataataaatacagttggtcctaaaagtaagaaagagatgagtaaaatacctgcaagagagaaattcaagttactcaaatatttaatcccacgatctaagccagtttgtgcactcgttaaatataaaacggcgaagatagctataagtacgagctgagtaagtaaagtgttatgaatggaagggaataaatagcttaatcctccagcaatttgttgagcaccaatcccaacagatggcacaatgccaaatactgtggctaaaacagctagaatatcaactgtttttccgatacgagaatttttcgatcgattaaataatggagtaactgtagccccgatagtgctacctttttgtttgcggaatgtgaaatatgcaattgttaaagcgaccattgcgtatagtgaccacggaaagagtccccagtggaaaaatgaatattgcatagcgagtttggcactttcctctgtccccgcttttcctgttaatggatctgtaaaatgtgaaatcggttcagcgattccataaaagaggagtccaattcccattcctgccccaaacaacatggatagccaagatggataattatattttggcttttctccatctttaccaagacgaatagaaccgtacttagaaaatgctaaataaacagccaaaataatcattgtagtcataagtagagagtaaaaccacccaaatttattgaggataaatgagtttaaagaagatgtaacactttgtaaatcgtagccttgtatccaacttgctggggtaattccccatataatgaataatgttgttagcaagaaggagatataaaatacactgttttctttttttatcatagaatcccacccttatttaataaagttaacaattataataatcataacaattaagtttttaattgtcaaaaaattacctttttataatgtgaaaggatgcaatttgttttagggaggtaaagagcaatgtgttcacgatatgtacaaattataggaagaaataatatgaaatattgcattttatattgttacatccagattttatgttaaattcttgaatggaatattaaaatagggggcaaggatatgaacaagaaatcaaagatcaataaagtgatgcttagcattagtacaatggctttatcgttaggcgcacttcaaactcatgcagcagcggaagaaaaagtaccgtataacgtgttgaaaacgaaaccggttggaattgaaaagtcggtagatgaagttggacatatttcaaaagttgatgaaactttatcatttcaagaacgtttaaaagtaggagatttttcacagcgaccagcatctattacgaagaaaactgcagtaaagcaagttaaagaaagctattcaatggctgatttaaacaaaatgaatgatcgagaattagttgaaacgttaggcagtattaagtggcaccaaattacagacttattccagtttaatgaagatgcaaaggctttttataaagataaaggaaaaatgcaagtcattatagatgaattagctcatagaggtagtacatttacgaaagatgattcaaaaggaattcaaacgtttactgaagtgctgcgttcagctttttatcttgcattttataatagtgaattaagcgacttaaatgaaagaagcttccaggataaatgtttacctgctttaaaagcaatcgcaaacaatccaaactttaagcttggtacagttgaacaagatacagtcgtatctgcatacggtaaattaattagtaatgcttcaagcgatgttgaaacggttcaatacgcatcgaatattttaaagcaatacaatgataattatactacttatgtaaatgatcgaatgaagggacaagcaatatacgatatcatgcaaggtattgactatgatatacagtcgtacttaactgaagctcgtaaagaagcgaatgaaacgatgtggtatggaaaagtagatgggtttattaatgaaataaatcgtattgctcttctaaatgaagtaacgccagaaaataaatggcttgttaataatggcatttattttgctagccgtttagggaagtttcatagtaatccaaataaaggattagaggttgttacacaagcaatgcatatgtacccgcgcttaagtgaaccgtattttgttgcggtagaacaaattacaacaaattataatggtaaagattatagcgggaatacagtagatttagagaaaatacgtaaagaaggaaaagagcaatacttaccaaaaacgtatacattcgacgatggatcaattgtgttcaaaacaggagataaagtatcagaagaaaaaattaagagactatattgggctgcgaaggaagtaaaggcacagtatcaccgtgtaattggaaatgacaaagcgttagagccaggaaatgcggatgatgtattaacgatcgtaatttataatagtccagatgaatatcagttaaatagacaattgtatggatatgaaacaaacaacggtggaatttatattgaagagacaggtacattctttacatatgagcgtacaccagagcaaagtatttatagtttagaagagttattccgtcatgaatttactcattatctgcaagggagatatgaagttcctggtttatttggaagaggagatatgtatcaaaatgaaaggctaacttggttccaagaaggaaatgcagagtttttcgcaggatctactcgtacgaataacgttgtaccaagaaagagtataattagcggattatcatctgatcctgcaagccgttatacagcagagcgtacactatttgctaaatacggttcttgggatttctataattactcgttcgcattgcagtcttacttatatacgcatcagtttgaaacatttgataaaattcaagatttgattcgtgcgaatgacgtgaaaaattatgatgcatatcatgaaaatctaagtaaagatcctaagttaaataaagagtatcaagagtatatgcagcagttaattgataatcaagataaatataatgtaccggaagtagcagatgattatttagctgaacatgcaccgaaatcgttaactgaagtgaaaaaagaaattagtgatacgttgcctatgaaagatacaaaaatgacaaaacataattctcaattctttaatacatttacattagaaggtacgtatacaggtagtgtcacaaaaggtgaatcagaagattggaaagcaatgagtaaaagagtaaatgaatctttagaacaattggcgcaaaaagaatggagtggctacaaaactgttacagcatacttcgtcaattatcgtgtgaatagttcaaatgaatttgaatatgatgtagtcttccatggaatcgcaaaagatgatggagaaaataaagctccaacggttaatataaatggcccttatagcggtcttgtaaaagagggaattcaatttaaaagtgatggctcaaacgatgaagatggaaaaattgtttcttatttatgggaatttggagatggaagcacaagtgcagaagtgaatccagtacatgtatatgaaagagaaggttcttataaagtatcattaagagtaaaagatgataaaggcaaagagagcagaagcgaaacaactgttacgattaaagatggaagtttaacagaatcagaaccaaataatcgtctagaagaagcaaatcgtatcgggctaaatagtacgataaaaggcagtcttattggcggggaccacactgatgtttatacatttaatgtagcatcagcgaaagatatcgacatttctgttttaaatgagtatggaattgggatgacatgggtacttcaccatgaatcagatatgcaaaattatgcagcttacggtcaagccaatgggaatcatatagaagcgaaatttaatgcaaaaccaggcaagtattacttgtatgtatataaatatgataatggtgatggaacgtacaaattatcagtaaaataagtgtctttccaatgtatgtttaactttactttttgtggaaaatagtatattatatagatatataatatatcggttattttctaggaggagcctgtcacaataggtttctcctgttcttttttagaggcctgtcttacaggcttttctttaaaaggtaaataactgaaaattaagaactataatctttgaaagaggtggggcatacatataacaaaaaagggattgtttaagaaagggggataagaaatggtcttgtttggttatccacttgaaacaatttatttatatggatttattattgctactatactcactgttatttatatcttctttggagatatatttgaatcgatatttagttttgggggcggagctgtatccgttgttactttattacttagtttcttcgccatgttatgtgggcttagttatataggagaatatttgttttcctttaatagtattactatttttggggctgcatttgctatatcttttatcggtgttttcatcatgaaaatactaattttaaaaccgattgcagaagcagagcaaaataccgtacaacgtatggatgaatttatcggttgcaaaggagaagtcattacgacaattcctacagaaggatttggtgaagtattaatttcatcccaatttggaagtaatgcaatcccagctaaaacagttggaaaaaaagatatttcgcaaggaacagaggttattatcgagggagtccaagatggtgttttacttgtacaaaacatcgcttattctttaaaaaaaccaaaattataagggggaatttacatgacgattccattaattatcggtggagttttactggcaattttaattctactcattttagtattcattacgaagtatcgtacggttggtccagatgaagcgttaattgttacagggaactggcttggtggaggaaagaatgttgttaccactgatgatggaaagaagattaagattatccgcgggggcggtactttcgtagttccaattatgcaaagagcagaacctttaagcctattaaactacaaattagaagttggtacacgtgatacgtatacgaagcaaggtgttccagttacagtaaatggtgtttctattattaaagtaggttctacaattgaagaagtatctactgcagctgagcaatatttaggaaaagaaacggaagagttaaaagtagaagcaaaagaggttttagaaggtcacttacgtgcaatcttatcttctatgacagtagaggatgcgtatagtaatagagagcaatttgctcaaaaggtacatgaagtagcttctacagatttaaagaagatgggacttcgcattgtttctttcacaattaaagaaataatggataaaaacggatacttagatgcgcttggtcagccgcaaattgcgaccgttaagcgtgatgcaacaattgcgaacgcagagcgtgaaaaagaagcacgtattgaaaaagcacgtgctgaaaaagaggcaaaagaagcagaatatcaacgtgatgcacaaatcgctgaagctgaaaaacataaagaattaaaagtacagtcctataagagggaacaagagcaagcccgtgcagatgcggatctttcttacgaattacaacaagcgaaagcacaacaaggtgttacagaagagcaaatgcgcgttaaaatcattgagcgtgaaaagcaaatcgagttagaagaaaaagagattgcgcgtcgtgaaaagcaatatgatgcagaagttaagaaaaaagcagatgcagatcgctatgctgttgagcaatcagcggaagcagaaaaagtaaaacaaattaaaaaggcagatgcggatcaatataagattgaagctgaagcgagagctcgtgcggaagaagtacgtgtagaaggtttagcgaaggcggaaatcgaaaaagcgcaaggtcaagcgaaagcggaagtacaaaaagcacaaggtacggcggaagcagatgttattagattaaaaggtttagcagaagcagaagcgaagcaaaaaattgcagaggcatttgagttatatggccaagcggcaattatggatatggttcttaaaatgcttccaagttatgcgaaggaagttgcaagtccgcttagtaacattgataaaattacagttgttgatacaggcggcggtggtaaaaatagcggcgccggaaaagttgcgggttatgcaactgatttaatggcaacgatgcaagaaacgttaaaagcttcttctggaattgacttaaaagagctattagaaggatttgctggaaaaggagcggtacaacaattatcaagtgataaacctgttgtatctgtagtagaagatgagaaaaaagaagtagaaaaagataaagaatagtaaggtggaaagaacctctagtaagtgaaatactggaggttcttctgtgaattataatatttcgaataatatacatttttatatattgttttaattatttaatttatatagaatgaaaaaggtatgtattaactctttaatagaaaaagagacaaagagttaatacaattaatcgtgtaatttatataaataaattaaatgtgagataattacatttaaaacggtatggaggggtagaaatatgtttcaagggaaattaaggagtagtagtttaaaaacaaagttacttgtgtcatttgttatcattttaattcttccaagtattgtaattggttggacgtcttatcaacaagcaaagacaaattttaatgaaacaattttacaatcagcggaagataacgtaaagattttaaataatgttattaacaaggagatagacagtaaaaaggtagacgcagtatattttacaaagttatttaatggagtaagttacggaactgatcagctccaaaatgtgcaaaataaattagaagaatataataaattacatccagaaatagaagcagtttatacgggatctagtacaggacaatttattcaatcaccgtctattcaaatgccagatgggtataatcctaccgaaagagattggtataaagaagcagcgaaaaaaagcggagaagtggttatcacagccccatataagtcaagtacaacagggaatattgttattacaatagcaaaacaaaatgaggataaaagtggtgttctcggtattgatttaattattaatgatattgtaaatacttcaaaaatggtcaatatcggcaaaaaaggatatgtagcaatctttgaccaatctaaaaatgtaatagcgcatccgacgatgaagccaggtgacaaggtagaagaaaaagtggagaaggaattgtataaacaagaaacaggtgattttaaattcaaacttgatggtgatgatcgcaatattacctttataacaaataagcagactggatggaaaatagcaggaattatgccttcaaaagaaattatcgaagcagctaaccctattttctataaaacaataactgttattggtatttcattagtaattggtgggattttaatttacttcataattgcttctattattagtccgttaaaacaacttgttatctcatcgaaaaagattagtgaaggcgatttaacagagtcaattacagttcattctaaagatgaaattgggcagctaggagaaagttttaacgagatggctgcatcgttacaaagtgtcatttccaatataaacacttcagcaagtcatgtagcggcatcttcagaagaattaacagctagtatgaagcagacaagcgaagcaacggaacaaattacacaggcgatagagcaagtatcaagtggtgcagaaatacaaacgaaagaagttgaagaaggagcaacattgttagaagaagttacagaaggaattcagcgtgttgcagatagttcttcattagtatctacagcctctatgtatacgaagaaaaaagctgaaaatggtgggaagttagttgaacaaactgtgaatcaaatgcaattaattcatgagtctgtttcacagtcagacaaaatcattggtttgttagacgataagtcgaaacaaattggagcaatccttgaagtgattcaacatattgcagaacagacaaatttattagcgttaaatgcggcaattgaggctgcgagagctggagagcaaggaagaggatttgcaattgtagcagatgaagtgcgaaagctagcagaacaatcaggacagtcttctacggaaattgggaaactagtgaaagagattcaatttgatataaaagaaacagtaagctctatgaatcaagttggagcagaagtacaatcaggacttgtagttgcaaatgaaacgaagcaaagctttgctgaaatattgaaatctacggatgatacagttgtacaaattgataacatggtagatgtagcaaaacaaatgacggtagatgcaaaacaagtaagtgcatctattaatgaaattgcagctacaattgaagaaaatgcagcaagcgttcaaaatattgctggttcctctgaggaacaattagcttcagtagatgaaataaatgcagcagcagtccatttatcacaaatggcagaagaattacaagagatgattagtaagtttaaagtgtaataacgaatgttaagaaacgaggtagtaattttacttcgtttctttttttatgaagagaaaaagaaatatagagtaaccgtgttatgattaagtataattaaagagactgtatattctttaaattctatctttaatcatgttaggggaatggttttgaagttaaaaaaattaaaactccaaccgagaattacattaactattagtatacttattttagttgtacttatgctaacgagttatttattttattacatattatctgaaacggtagaagagcaaattggcaaaagggctttacatgttgcgaaaacagttgctgctatacctgaaataaaggaagcttttcaaaaagaaaacccagcttctattattcagccgattgcagaaagaattcgaatggatacagaggctgacttcattgtagttggaaataaagaggggattcgatatgcacatcctgagcgagataaaataggagaagcgatgattggtggagataacaaaggcgttttattagaaggaaaatcatatgtttcgaaagcaactggatcattaggcccttcattacgcggaaaagttccaatccgtaatcaggaaaatgaaatcattggtgttgtgtctgttggattttcaatggatgatattcatggagcggtagaagtgtatggaaagcgtgtattttggattacaataatagggctattaattggagtaatcggctctatatatttagcggcaagtataaaaagaatgatgttcggtatggaaccagaagaaatttcatctttatatgaagagcatagtacagtgattcaatctgtacgtgaagggattattgtaatcgataaaaatggcatgattagtttagtcaatcaagcagcctatgatattctttcgctagataaacaacaaaatattattggggaatttattttaaatgtaattcctaattcaacgatactagatgtacttcaaactggtgaagaacagtttgatcgccaattaaatataaaaggacaggctgttattgcgaaccgtctacctattaaagtaaagaataaagtaactggcgttgtatcgagcttacgtttgaaatctgaaatggatcagttaacagcagaattatctcagacgaagcaatatacagaggcattacgagcgcaagcgcacgaatataacaatttattgtatacgctttcaggtcttatccaattagaatcatacgaagatgctttagagcttattcataaggaaacagcggtatatcaagattttgttcaatttattatgaagcggattcaaaatccatggctaggtggaattttaattggattttataatagagcacgagagttgaagattgattttatgctagatagagaaagtggtttagacaaattaagtccacatattgagagtaattatgtcgtttctattttaggaaatttaattacgaatgcatttgaagcaattgaaaaaaatgaagagaatgataagaaagtaaggatgtttgtaactgatattggagaagaaatattaattgaagtggaagattcagggcaagggattcatgatgaaataattactagcatattctataaaggcttttcgacgaaagaaggaggagagcgaggatatggattagcaaaagtgaaagagttagtagaagatttaaatggaagtattgcaatcgaaaaaggggatttaggtggtgcgttatttattattgcactaccgaaagagagaggcgaatagtaatgggtgaggagattgaagtattaattgtagaagatgatattcggattgcggacattcatcgtcgttttactgaaaaaattgagggatttaaagtaattggaacggcaacgactggagaacaagcgaaagaatggctagagcttgtgaagccacagcttgttttattagatgtgtacttacctgatatgcaaggaacggaacttgtcacatatattaggaatcatttgcacgatacagatattattatgattacagcagcatcggaagcagatgtagtgaggcacgccctgcggggcggagtaacagattatatcgtaaagccactaatgtttgaccgatttaaagcaagtctggaaggctatcaaaaaaagattatacagttaaagaaaaacaatcaattatctacggaacaaattgaatatttatggtctcaaagaggcgtgaagggaaatgaaatggaatatgccccgaaagggatagatcctttaactttagcgaaaataaaaaagcatatgttaacagttaatgaagaagggattacagcagaggtactaagttcaatggtaggcgtaagccgatcaactgcaaggcgctatttagagtatttaatatctgggaagaaagtccacgcagagctaatatatgggagtgtggggagaccggagagacggtattttcttgtttcttcataataaaaaacagtagaggatttatttcttctactgttttttgcgtcttatattggaataatcccaattacaatgccagtaatcaacatcaccattgtcgttccaactgcccacaataaagtaaaacgttgatgttcaccaaaatcaacttttgccatcccaactaataaataagtggaagcgacaagaggacttaataagtgaacgggttgcccaagtaaggaagcacgtcccatttcagctgcactaattccgtaagtagcagcagccttagttaaaataggtaataccccaaagtaaaatgcatcattggacatgaaaaatgtgaatggcatactgagaagagctgtaataattggcaattgtggtccaagtgcatctggtataagagttactacactgttagccattgcatctaccatttttgttccagataaaataccagtgaaaataccggcagcaaatacgagagaaacaactgctaatacattccctgcatgagaagcaatacgttctttctgttgttctaagtttggatagttaatcataacagcaatagcaaaagcgactgtaaataaaacaggtaacggcataacttctagtatgagacagacaagtaatgtagcggttaataaaaagttaatccatagaagtttaggacgtttatgcactgcggcttcgacagttgcagcttgctcatccattgtttgcatttgttttaaatactgtacatccataattcctaaacgttttctttctttttttccaagatagtaagcaacgaaaacaacccaaattgcaccagcaatcattcctggaataagaggtgtaaataattcagaagcctcaagtccaagtgcgctcataacacgagctgtgggtccaccccaaggtgtaagatttgttacccccgcccctaacataacaactccagctaatatgagggggttcattccaaggcgcttatatagtggatacattgcggaaactgtaatcatgtatgttgttgtaccgtcaccatctagagaaacgataatagtcaatatagctgttccgacaacgatttttaaaggatctccttttacaaattttaaaatcttactaatgacaggatcgaataaaccgctatcaatcataatcccaaaatataaaatagcgaacataagcataataccagtaggtgctaatttttgaattccctctaacatcataggccccatattggcatagaatccgccaattaatgcaaaaacactcggaattaatattaatgctactagcgctgacatacgtttcgtcataattaaaaacataaagacaaataccatcgcaaatccaagtagtgctaacatgtaatttccccctcaaaagaatgattgcgctttcaaaatagaataaaaattcagaaaaaggttttttatttataataaaagcatctattcaaatggtaaataatttgaaaaataacatcattagaagcataatttttattttgttcattttgttcatggtagttaatttgaatttttaaaaagtaagctgctcctcgtaagaatggtagaataagatgaaaatagtgaagtgtgaaatagggagtagatgttatatgaaaacgagaattgaagagatttatagctcttatgaaggaaaagtagaggagatttttattaatgaatcttcttacgtatatgaatgggagaaattactgatgatccgaaaaaatgacggtgagcttaaaaaaattgcagtcgggattagtggaaatataagattggtaaatgtagaagttggacaggaaattagtgaggatacattattagttaaattagaagatgatttattaattacaggttgtgagtgatgagagatgtgtagaaataactacacatctttttttgtttcctatattacaaaaagcacattgttttttcacaaatctcacacaaccttttggtattcttttcgtggagtatacggtttctagggaggaatattgatgaaagtaaaatatgtcgtacttgctatatgtttatgtttcgtatttacggtagtcgggtgtgggaaaaaggaaacagcagctgttgccattgatgagaaacatgataaatgtgatatttgtcaaattggggtaacagataatcaatttgcaacagaaattattttagaaaatggaaaagcgttaaagtttgatgatatcggttgtatgtataaatggatggagatcaactcaggtgaaaagacgaaagagaaatttgttcgagattatgattcgaaagattggatttcgttagaagacgctacttacgtatatgataaaacaataacgacaccgatggcttataatgtcatttcatttaaaaataaaaaagatgcagagagctttgtatctaactataaggggaaagttctttcatataaagagctagcagagcataaatgggaaatgaataaagagatgatggggaaaccgaaagcaggaaatcatggtggacatcattaataatagaaaaagacaactatatagttgtctttttctattattaatcaggtgcaaatatagaaaaggtgtaaaatttttagaagaacggttacaatggaatatagtaacctaaagcaatcatttatcccgcattaacgggcaataagatccccacctcaaaatttagtgaaagcaaagaagttaggtggagtcgggctgcccgtaaaagcccgattggtgtgggctaataattagtggtggatgaacaaaacccccactaattaaagtttcactttatgtactttttagaaatgtatacaaatgcggtaaaaacgtgctaaactaattgcttcataatgttaatgatggggccatcaggcgtatcatttcaataggttgagaaacatagtataagcttaagataatccgattaaagaaggaatataaagggcttatggataaatgtactcaagaagagttattgtatgtgatggaggaatggttaagaaaacattatctttcataggagctgtagttgtgagaaaacaaaaaattttattatgtattttattaggacttttaatgacggtagtggcttgcgataagcaagaagaaccagaatcgaaaccggttcatgtgaaaaatgaaaagaaaaaagagaagcataaagaacaggaagaatctaaagaagagaaaagtataaatttaatggacaaacagttgttactttcagctacccttggagatacagagacagctatgaagttgattcaggatggagcgaatataaacgtagaaggtgacaacggagaaacgcctgtccttgcagcgacgtaccaaaatcatgtagagacagttaaagcattaattggtgcaggtgctaatattgaaattaaagatgagaaaaaaagtaatccacttctttatgcaagtagagaaggatatacggatattgtaaaagtattaattaatgcaggagttaatacgaaagaaacgactaggtcaggtgggacagcacttatttctgcatctgagcgtggccatgtagaggttgttaaagaattattagagcatacagatattgatgtgaattatacaaatgaacgtggtggaacagcgttattagaagcaattgtattaggaaatggtagtgaaaaccataagaaagtaattcaattgcttattgatcacggtgcagatgtaaacatggctaacaaggaacatctgacgccactgcaatacgctgaaaaaagaggttttaaagatattgtaaatatgttgagggtagctggagcgaatgaagtagtacagccacaacagccagtagagtaaaaaacgaaaaataatcccatttagatagacagaatgaagaaatcagttagtatgatggattcagtaatgtgtatttgaatgggatttttattttgaatatgaaaaatagattatgaatggatggtaaatggagtaaataaggaggcaaccttatttggcaattgtaaaaaatgaaaaggtagtttctgtttgttgcagtgccagaagtacgcccgtagctgctgaggcaagtgtggaaactttagcggagtttcaagggaacggatatggtactgatggtgttacagcctgggcgatatcaataaaagaagaaaaaagcattccactttatagtacttcttggaataattatgcttcacaagccgttgcgagaaaactaaaacttattaactatggaatgaatttacatatcacttaaattttaaagatagttgtttgccgttgggatttatttgtatatctagattaatattaagaaaatatggtgaatattaacatttgattaacacctaattaacaatctatcaaaactgacttaataaatgcgtaatatagtaaaggtaacaaaataaatagggtagagaacatttgagaacacccacttacatataatgtgccactttcttaggtgtgctctattccctagagttcaaataaggagaaaggcgttctatgtaagtaggtgtttttagtttggataaaaatagaacagttaggtggaaaaatgtttaaagaaccttatattgcgatgataaaggattggaaaggatacaaagcatacaaaaaattgccgaaaaaagtttttcttatgactggttcaatgctggaattaccagagcgtgtatatgaattgcagaaacatggacatgatgtatttcttcattgtgattttatacaaggcttaaatacgaatacagaggaagcgcttttgtatattcaagatgttatcggggcacaaggtattatttcaacaaagggttcaacaattcgaaatgctaataaaattggattgaaaacaattcaacgtatttttattgtagatactttatcccttactaaatcaattgaaaattgtaaaacgactaaaccaaatgcagtagagattatgccggggattatgccttctataattaaacagctagtagaggaaatagagtttcctattattgcaggtgggctgattcaaacgcgagaagatgcggaaattgcaattcatgcaggagcaagtgcgatttcaacaagtcattatgaagtatggatacaagaagaaaaaaggagtgcaaccttgtgattgaattgaaaaatgtttcaaaggtatataaaaatgcagaagagacagcggttaaaggcgtatcggttcatattaagaagggtgaattttttgttttagttggaccttcgggatgcgggaaaagcacattattacgaatgatcgctggcttagaagagatttcttcaggagatttaattattaatgaacgtgttgcaaatgatctagagccgaaagaccgtaatctatcaatggtatttcaaaattatgcattatatccacacttatctgtagaagaaaatattttatttggacttaaggtaagaaaagtacaaaaagaagagcgacaaaagcgattaatggaagccattgaaatggtaggactgaaagagtatgtgaaaatgaaaccaggccaattatcaggcggacaaagacagcgtgttgcacttgccagggcaattgtgagtcaagcaccaatctgtttaatggatgaaccactttcgaatttggatgcgaaattacgtgcgcaaatgagaattgaaattagagaaattcagcagcgattaggaattacgatgatttacgttacccacgatcaaatagaagcgatgactatgggagatcgtatcatggttttaaataaaggaagtatacagcaagttggaacaccacttgacatatataacgaaccagcaaacgaatttgttgcaagctttataggttctccttctatgaatataaatgatggggaagtaaataaagaaaaaggtgtattacatatagggcaattgcaaattccattatctattagacagttaaagcaattaccagaaggaacaattcgcataggcatgcgtcctgagcatattgcactgtctgaggagggacaagaagtgacgttgcaatctgtagaagtattagggaatgaatctatattgaactttgcggtaaatggaacaacttggagtgcgaaagtcatcggacagttactcttgaacaaaggtgacaaagtaaaattattattctcgcaagaaaagttatgcttctttaatgaaaacacgaatgaacgcttaaaagtggtagctgaagaagagttgaaagtggtggcgaaataatgatcgaagtaagtaagttaccagttcaaacaaaggtgtcaaaaaagaaaaaattatgggggagaacgaaagatttaagaataggattattgtttttggcgccatctattttgttattttcgatttttttgttctatccattgtttaggacaatttactatagcttttatttaaccgatatacatggggaagctaatcttttcgttggcttagaaaattatcaatacttattctctgatccagccttctacaaaagtataaaatcaactttattatttgttttatatacagtgcctacgagtattatatttgctttgtttcttgcattgattgcaaatggaaaagtaagaggtattgggttattccgagttctgttttcttcgacgatgggaatatcagtagctgctagtgcagtgatttggctatttttatttcatccaagtgtaggattatttaataatatattagcctctatgaaccttcctgcaatcgcatggttaacgagtccggactgggcactattctctgtatcagttacaacagtttgggtgaatacaggttttgcatttttagttatattaggtggtttacaaaatattgatacgtcgttatatgagagtgcatctatagatggtgctagttatttatataaacttcgccgtgttacattaccgatgctatcaccaactttattctttattgtaacagtaacattaattagtgcgttccaaagctttggacaaattgatattttaacgcacggtggaccaaatgatgcaacgaatttgattgtgtactcgatttacaaagaggcgtttgtgaatcatcaatttggaacagcaagtgcacaagcaatggtattatttgttttcatttttcttgctacattacttcaatttaagtttgctgagagaaaggtgcattataaatgattgttaaacagtggaaacaaaatttcctattatacatgctgctcattattagtgcagtaatggtattttttcctgtactgtatgcatttttaataagttttatgacaccagacgatattcaaatgagaaggttatttccgacccagtttacttttgataatttcattaatatttttcaaaaagtaccactttttacatacttatataacagtttaattgtatcgacagtcgttatgattggacaacttatcgtatcaagtttagcagcttatgcttttgtttttcttcagtttaaagggagaaacttaattttcttcctgtttatttcaacgatgctgattccgtgggaagcaacgatggtgcctaactttttaacgattcaaaactttggctggatcaatagtttcgccgggatgacagtgccgttttttgcaacagctttcggtattttcttgttacgtcaacattttatgacacttccgaatgaactaaaagaagctgcgtttattgaagggattggaaatataagatttctattcagcgttgtaattccgtattgtaaaacgagttttattacgcttggagtatatagctttttaacaacatggaatatgtatttatggccacttttagtgaccactgatgaaaaagtaagaacagtgcaaatcggtgtgaagcagcttcagtctcaagaagttgcaactgattggggaagcgtaatggccggtgttacggttatcgttattccaacattgattttactatttttagggcaaaagcaattacaacaaggattaacaaaaggtgcaattaaataactaagagaaggtgagatttaaatgagtctagttaaaaaaggtgctgctctattaatggcagcaacaatggcattatctagtgccgcttgttcaaatagtaaaacagaaggaaaacctgaagcacaggcaaaagtagcaccagttgaaaaaaatggtgataaaactgtaattcgcttctggcatgcgatgggtggaaaaacacaaggagtactagatggtcttgttgcagactataataagtcacaaaataaatatgagataaaggcagagttccaaggaacatatgaagagtctttaacgaaatttagaacgatgtctgcaacgaaagaagcgccagctctagttcaatcgagtgaaattacaacgaaatatatgattgatagtaaaaaaatcacaccaattgatagctggataaaaaaagataagtacgatacgtcaaaattagaaaaagcaattacaaattattattcagttgatggaaaaatgtattctatgccatttaattcatctacaccagtattaatttataataaagatgctttcgcaaaggcgggcttagatccagagaaagctccgaaaacatatgcggaattacaagaagcagcgaaaaagttaacgattaaagaaggcggaaatgtaaaacaatatggattctccatgcttaactacggttggttctttgaagaattgttagcgacacaaggtgctttatatgtagataacgaaaacggccgtaaggatgctgcaaaaaaggcggtatttaacggtaaagaaggacagaaagtatttggaatgttagatgatttaaataaagctggcgcacttggaaagtatggagcaagttgggatgatattcgtgccgcgttccagtctggacaagttgctatgtatttagattcttcagcaggtgttcgtgatttaattgatgcatctaagtttaatgtaggtgtttcatatattccgtatccagaggattcgaaacaaaatggtgttgttattggtggagcatcattatggatgacgaatatggtttcagaagaaacgcaacaaggtgcttgggactttatgaaatatttaacgaagccagacgtacaagcaaaatggcatactgcaacaggctatttctcaattaatccagatgcatataatgagccattagtaaaagagcaatatgaaaaatacccacagttgaaagtaacagtagatcaactgcaagcaacgaagcaatctccagcaacacaaggtgctttaattagtgtattcccagaatcaagagatgcagttgtaaaagcattagaagcgatgtatgacgggaagaatagtaaagaagcgttagatgaagctgccaaagcaacagatagagcaattagcatttcagctcgtacgagtcaaaaataagagaaagccgtatccttaaaagggatacggctttctttatagggagataagggatcaaagaaatgatgaagtcttatctcttttatatgagtaaagggtctagagtaaatgttgtccttttcattatttatttaactccattgtgacttgtttaccatttacgaaaacctctactaccgctactacaacttccattacttttttcatctctcatctctccttgttttttgtttcatttcttactttcagtataaggaaatacagtaattacaactatcgaattggatgacaagagacttacatcgttgtaaggataatcattttatttgtaataaatgtgattttagatttgagttcagaaatttctgccgttttgaactataattagaaagaggggggataatatgaaaagaattcttgttattagtgatattcatggagagataaaaaagtttgaacagttattggaagaagctcaatatgatgcgaaacaggatcaattaatcttactgggagattatgtagatcgtggtccaaatgcgcgtgctgtaattgaaaaggtaagagaattgaaagaagagggagcactcattttaaagggaaatcatgaagatatgatgattaaggcgttaacgacaaatgaggaacattcatggaaccattgggtaaaaagaaatggtggagataagacattatatagctatggatttgtagaagaagatattgcggttaatgagaaagacttccaaaaaccgattttacactcccgtgtattagaggaacatataaagtttattcaagaattagatcattacattgaaacagaagagtatatatttgtacatgctggggttgaaccgatgaaacgagtttctgaatctgaaccatatacgttaatgtggatccgtaatgaatttcataatggatatagcggtgaaaaggttgttgtatttgggcatacggaaacaaaaacgcttcatggtagtgaggagtgcggagtgtattttggtagtaatcgtattattggaattgatggcggggctgtgtacggtggtcagctaaattgtttggaattgccgagtaaaaaggtatatgtaataaaaaattgaaagagataagaggaatcttatttctttcaattttttattaagctaaatttaagacaaagtttttataataaaacttcaaaattttagaaggaaatagttaaaaatgaaaatacgtaatgtaactacattcttttgttatgaagagaagaaatgtaataataaatagaattgaactatttgatggaaggtgagagcatgcgcttacttgtagtagaagataatgcctcgttattagagtctatcgtacaaattttgcgtgatgaatttgaagtagatacggcaataaatggagaagatggattgtttttagcgcttcaaaatatatatgatgcaattttgctggatgtgatgatgccagggatggatggatttgaagtaattcaaaaaatacgtgatgaaaagattgaaacaccagtcctgtttttgacagcgagagattctttagaagatcgggtgaagggattggattttggtggagatgactatatcgttaagccatttcaggcccctgaattaaaagcgagaattcgcgctttactacgcagaagtggtagtttaacaacgcagcaaacgattcgttataaagggattgaattgttcggaaaagataaagacgttcaagtagatggacaaagtattaagttgacattgaaacaatatgagctactagagtatctcattcaaaatagcgggaagattttaatgcgtgaacaaatttttgatcgtgtttggggatttgattcagatacgacagtagccattgtggaagtgtatgtgcatcatttgcgtaaaaaattagaaccattcggttatcagaaagatattcaaactgttcgaggtattggatatatattaaaagaacaatgaaaaagggaagtatgtttcaaaagacacgcattcgtttgactatagtgaattcattagtatttatcctattaataggtatattaggtagtattatttattcatacacatataagcgtatttataatgaagtggatcaatctataaaaatgatggctcagtatagagaaaaattagatgttaaaataccaccaagaaaacgtatggagaatatccaaattggagatccgcgagtaactagaataacttggaatgggaaaatagtgaaaatagagggcgataatcgtaaattccgttcaatttttgaagagaatttggaaaagttttctccggaaaaaataggggagttacaagatatcaaagtacaaggacgatattttagagcattttcgcttcaaaaagatggagaaatagttcaaatcgtgcgagatataacagcggaagaaggaatgttaaatactttatttttaatcctcgttataggttgtagcataggaagtttatgtgcgataggtatcggctttttcctagctggcagagcactcgtacctattcaaaattcatgggagaaacagcagcaattcgtttctgatgcatcacatgaactaaggacaccgcttgcagttattcaatcaaaaacggatgtgttatttcagtcaccatccgctacgatagaagaaaaagcgatggatatttctacaatttcaaaagaatgtaggcggttatcaaaactcgttagtaatttattattactagcacgttctgattctaatcaaattgagatggataaaaaaacatttgaacttgataaattgttagaagaaatagtagctccatataaagagattgcttcttatcaagaaaaagaaatgatactaaaagtagaacgtgacgtatcttttatggctgatagagagcggattcatcaaatgatggtcatactgttagataatgcgatgaagtatacaaacgaaggcgggcatattcaaattgattgcacgcagacgagtagttcgattcgcatacaggtgaaagatgacgggataggagtgaaagaagaagatattccgaaattatttgatcgtttttatcaaggggatagagcaagaagtacgtcagaaggagctggattaggtctttcaatcgcaaattggattgtagaaaagcattacggaaaaatatcagtagagagcaaatggggagatggcacttgttttgaagtgattttccctaaaaaccaaaaaatataagtaagaagacgatcttgtttttacaaggtcgtctttttttaagacaaagttaagaaactatttatattatatatggcatgaagaaagttcgttacatgaagaagagactaggtgtatgtgagtggggtttatcaatcataatgttatctcaagcagcgatgagatgtatgtatagtattaaaaaaactaggggaatgatgggaaagaaagtataagagggaggaattaattttgaaaaagaaaatgatgacggtattcactattggagtaatgagcttaagtatattagggggtgcctctccttctgaaacatcaaaaggaaagacagattacacacaacgtagtaaagaacaattaaataatggaaagatacatgctgtgcatacagaagaaaaggcagagaatctaggtattgaaacggaagggaaagaacaaattacgttagaaaaagaaattcatgagacagaagtaggaagagaagcgaagcagctaggaatttcgattgaaggaaaagatgttgggacgctgtcagaagaaatctatgaaacaaaagtaaagcaagaagcgttaaaactaggcatatctatagaaaatacatcaattgtaaatttaattaatcaaattaatacgattaaaattaatgatgaagcggataaattaggtatttcgacaaatggaaaagaaatagaggacattgcagaagaaatctatggaacgaaggtaagagaggaagcagggaagttaggtatttcaccaaaaggaaaagagatagaagtgttagcacaagaggtgtacgaacaaaaagtgcaggaagaagcaaaaaaatatcatattgatttatatgggaaagatatatatcaagtattaagagaaattaatgaacaaaaggtgctacaattggcagatgagcttaatatggataaagcgaacatgaatattcaagagctaacagaaaaaataaaaaaagatcaacctgagagagaaaaagaactaaattttgtaccagtgattcgaacggatgctgacgcattttattcttatttaacgaactaaaaagggcgtgagagtgatacggaggtttaagtggtatatatgtatagcattactagctatagcggtatggagtgtatatacaaatggaattacaaagtatggggagaagtggacattcttcaatatacaaaacgggaaagaaccggaatttagtaataatgatgaaaaggtcattttatcaagtgtaccattaattcagcaactaccagagctagatagaggctgtgaagtgacaagcttagcgatgatgttacaatacgctggtgtttcagtggataagatgacattagcaaatgaaataaaaaaagttgattttatagacgatggtgtgcgcgggaatccaaatgaaggatttgtaggtaatatttatacattttctgaatcgggatatggtgtatatcatgggccactttttcagttagcggaaaaatatttacctaataaagctgtagacttaacagggaagaatatagaagaaatttataagaggataaaagcagggcaacctgtagtcatgatcacaaatgcaacatttgcaccattagatgcagctgaatttactacatgggaaacaaatagtggagatgtttctattacgtataatgaacattgtgttgtacttattggatatgatcaggaatttgtatatattcgagatccacttgaggatagcttagatgtaaaagtaccgagagaaacctttgaacaggcatgggtacaaatgggaagtcaggcaattagttatgtaaagagcgtcaaataaattaggacgaagagttttagtaatatgactataaggcgaagggtaaagatttaaggattataagagaagttttatagagtagaagctgttaagaaataagagaactttagcatatataatgctaaagttctcttatttttatgattaaaatacgtataaggagtggatatgcaaaaatgcataattgacgaaaaattcacatgttatcattatatattgttttatgcatgttaattgtataaaatgacacaagtatccacattacataaaggaggcttattatgcaaaaaatatttaactgggttaaatgtatgagtatcaataaaaaattaatcatttcattctttattattttaactataccaggaattattattggtggtgtttcatatcaaactgccaaaacaaattttgaacatcaaatgacagctaaagcaaaggagaatatttcgattttaaatactgttatttctcaaaatatagaagagaaatttgttgatgcgacgtactttgcagacatcttaacagaagatacatatctaaatggacaggaagaaatagtaagaacgaagctagcgcaatatataaaacttcatccagaagtagaaggtatttatattggaacagagacgggaaagtttataagagaaccatttatccaaatggctgatggatacaatccaagagatagatcttggtataaagaagcacatgaaaataaagggaaagtaattgttacttcaccatatcaatcagcatctaccaaaaatatggtagtgacaattgctaaagaagtaaaagatggtaaaggtgttataggaattaacttaaatttagataacatcttaaaaatttccaaaatgattaatattggtgaaaaaggttatgcagttattttagatcaaaataagcaaattgttagtcatccatctagaaaaccaggtgcaaaagttactgatccttggattaaaccaatttatgaagaaaaacaaggaaatgtgtcttatacagaacaagatgataaaaagaatttaatctttgcaacaaatgagaaaacaggctggaaagtagttggtgttatgttcgatgaagaaattaaccaagctgccaatccagtgttttataagactttgattgtcattgctattgctattgcatttggtagtatattaatttatttcattacaaagtctattacagggccattacgaaaaatagctgaatcggcatataaaattagtaagggagatttaacagagaaaattacaatccattccaaggatgacatagggaaattagggaattcatttaatgaaatgtctatgtctttacaagatgttattacccaaattagcttttcagcagaacatgttgcagcatcggctgaagagttaacagcgagcgtacagcaagcaaatgatgcgacagatcaaattacaattgcgatggaacaagtatcaggtggggctgagtcacaaagtcaaggtgttgaagaaggtgcggctacattacaacaagtaaatacagcaattcaagatgtaactggaagcgcagagtcaatttctatttcctcattacatgcccgtgaaagagctgaagagggagaagatttagttgaacaaaccgcaaaacaaatgcagtctatttctaggtcggtatccgagtcagatgctattattaaacttcttgatgagaaatcaaagcaagtaggagctatttctgaagcaattcaaaacattgcaactcaaacaaacttattagctttaaatgcggctattgaagcagcaagagcaggtgaacagggacgaggatttgctattgtagcagatgaggttagaaaattagcagagcaatcaggagagtcatctggagagattgcaaatttaattgcagaaattaaggcggatattgaacatactgttaaggcgatggataatgtgaatggagaagttcaacaaggccttgatgttgtaacaaaaacgaaagtaagttttacggaaattttaagttctactacacatattgtttctcaagttaatcaaatggtagaaacaacgaagagaattgctggagatgcaaatgaagtgacaaatgctattgatgaaattgcagctgctgcagaagaaaatacagctagtatgcaaagtgttgcagcttcaacagaagaacaggttaattccatggaggaaattagttcagcttcgcaaaacttagctgagatggcagaagaactacaagcgatgactagtaaatttaaagtataataacagcagataagtaaggtgaaaataatatcaccttacttatttttctattcagcaattaggggagtcattaacaggatgaaaaaaagaaaaagactatggaatttatggaaaacgattacattgttagtttgtacagttgtaattttttctttacttgtgacagatatattaattagtcataatgtagaacggacgacggaggatagccaagcagagaaagcaaaaacaattgcacacattgtggcgaatgattcgattgtaatcgatggtttggttgggaaagcagatacctctgcaatccaaacgtatacaaatagaatattacaaaacacaggtgttcaatttattgtagttatggacatgaatggaataagaaagtcacatccaaatcctcaaaaaatagggcatcattttattgggggagatgaagggcctgcattgaaaggaaaagaacatgtatcgttagcagaaggaactttaggtatttccatgcgagtgtttgtaccaatattttctgaaacaggtgaacaacttggagcagtggctgttggtatttcagcagataatgtaaaagagagagttaaggaaagtagacatattatttatattggtgtcggagtgggtgtattagtcggaattataggagcaatattgctagctagacatataaagaaaagtttattcggtcttgagccgcacaggatagcaaaaattcttgaagaaagaaatacgatgctacaatctgtaaaggaaggtattattgctgtagataaagaggctagagtaacgttaattaataatgaagcgaaacgtctatttaaaaaaagcggacttgaagaagattttatcggtaaagatgttgagttgtatatgccaaattcacgtataaaagaagtattgcaaacgggagaagtacaattaaacgaagaacaaaatatttatggaattacgattgtgacaaatcgagttcctttatatgtaaaaggagaaatagttggtgcaattgcaacatttcgtgataaaacagagattagaaaactagcagaggaactaactggtattagactatatgcagaagcattacgggcacaatctcatgagtttatgaataagatgcatgtcgtattagggcttacacatatgaaacagtatgaagaattacagaagtatataagcggcatggtatcagagcatcaatatgaaattggtggagttatgaaaagaataaaaagtccagtatttgctggttttttactaggtaagctcagctatgctagagagaaaaatataaaattaattataagtgaagattcttacatgccggaaatagatgttgaaagtattactcatgaacttattacgattgtcggaaatttaattgataatgcattagaggcagttacgaattgtgaaaagaagcgagttgaagttaagatacaacatggggatatactaactattacagtgcaagatacaggaaaaggtatacaagaaaaagaaatagaggaattatttacgaaaggttattccacaaagggagataaccgcggttatggtttgtatcttgtaaaagaaagtatacagcgaataaatggggaaattcatatgcattcattagtaggaaagggaacaacgataacgattgaaatacctaaaggtagggatgagaggcaaatatgattaaagttttaattgtagaagatgacccgatggtagcaatgttaaatacgcattatttagagcaagtaggaggatttgaacttgttcaagcagttaactcagtaaagtcagcgatagaaatattagagaaatcacgagtagatttagtattacttgatatttttatgcctgaagagactggttttgagcttttaatgtatatccggaaccaagaaaaagaaagcgatattataatgatttcagctgtacatgatatgggaagtataaaaaaagcattacaatatggcgtagtagattatttaattaaaccatttacatttgaacgatttaaaaaggcattaactatatatcgagaaaaacttactttcatgaaagaacaacaaaaaattagtcaatcggaattagattcattaattttacaaaaagaaaaaagagagcctactgtgacgaaagagcttccaaaagggttaacgaagcaaacgttgcaattaatttggcagaagatcgagtctctgaatggaagagtatttacaacagatgaaatggcacaattagttggaatttcaagagtttctattcgaaaatatgtaatgtttctgactgacattggggtgttagaaaacgaaatgatgtaccaacatgtgggaagacctgtaagtaaattaagatgtgttgatcaaaagaaaatagagttttacgtataagcgacttaacataagtcgcttatactttttttaattacaaaatcaattacaaaacttacaaaaactatttttactattgaaagcgttttaatattgttattaagaaaacgagggggtgccatatgggaattcaaaagaatgtggaagcggtatcattttctgaaggaaatgaagtacaaagagaatctttcgcttctaaaattatgaatgtaaaaatcggtgttatacctttaccgttatatgtagtattggctgctattatttatggggcatctgtatataataaattgccagcagatatgattggtggatttgcagttattatgatcatggggattttcttaggcgatattgggatgagaattccaattttaaaaaatatcggtggtccagcaatactttcgttatttattccatcattacttgtattttttaactggatgaatccagcttcaatggaagctgcgactatgttaatgaaaaaatcgaactttttatatttatatatttcttgtttagtagtcggaagtattttaggaatgaaccgtaaagtgttagtacaaggtttcgttcgtatgtttattcctttagtagtagggacgttagcttctgtagcagtaggattattggtcggttcattatttggatttgaaatgaagcacacattcttctttatcatcataccaattgtgagtggtggtatcggggaagggattttaccattgtcgctagcttatagtgatattttaaatgaatcatcagcaacgtttgtatcacagcttattccagcagctattattggaaatatgttcgcaattgtaagtgcagggtatatgaagcgtttaggtgagaagaaaccggagcttagtggtaacggtgtattagtgaaaacagacaatcaagcagaattattaaaagaacaaaatacagagaagccaattgacttctcattaatgggagcaggtttattaattgcgtgtacgttcttcatcttcggaggatttgcttctaagttcatcggtattcctggggcaatcattatgattttctcagcagcgcttgtgaaatactttaaattaatgccagcaaaaatggagcaaggagcattccatttatataaatttatttcgaagaatttaacttggcctttaatggttggattaggattgctatatattccgttaaaagacgtagcagcagttctttcagtaggatatgttgttgtgtgcgcatcggttgttcttacaatggtagcatcaggttttcttgtagggaaagtgatgaaaatgtatccagttgaatcagcgattgtaactggatgtcatagcggtttaggtggaactggagatgttgctattttatcagcttcaaatcgtatggaattaatgccgttcgcgcaaatttcgactcgtttaggcggagcggcaatggttgtaacagcgacaatattattaaagatgttttcatgatcaaacaagctagctatattcatatagctagcttgtcaaattaaggggagattataagtatgttagcaaatcaaattaatgaaagatcattgttattgcataaagaattagtaggaaaaattgaaattacaagtaaagtagaagtaaattcagcggatgatttaagcctgacgtatacaccaggtgtagcggagtcttgtaaagcaattgcggcagatgaagaaacggtgtatgactatacagcacgtggtaatatggtggcagttgtctcagatggaacagcggtactcggtttaggaaacattggaccgaaagcggctatgcctgttatggaagggaaaagtattttgtttaagaagtttgcgaatgtagatgctttcccattatgtttaggcacaacggatgtagatgaaatcgttacccttgtgaaaaatttagagcctacatttgcagggattaatttagaagatattgcagcaccgcgttgttttgaaattgaaaaacgattaaaagaagaaacgaatattcctgtattccatgatgatcaacatggaacagctattgtcgttttagcagctgttattaatgcattaaaagttgttagcaaacaaatggataatgtgaaaatcgttattaacggtgcgggttcggcaggaattgcaattggaaaattattattaaaggctggtgcaaagcacattacgctagttagcctagaaggtattgtttgtgaaggtgaaacatggatgaacgaagcgcaaattgaagtttcaaaaaagacaaatcgtgaacatgtgcgtggaacgttaaaagaagcgattaaccaagctgatatttttattggcgtatctgctcctaacgtattaacgaaagaacttgtacagacgatgaatgagaaagcaattgtgtttgcaatggcgaatccaattccagaaatcttccctgaggatgcattagaggctggggcagctgtagtaggaactgggcgctcggattatgcgaatcaagtaaataatgtattggcgtttcccggaatattccgcggtgcgttagatgtgcgcgcaactgatattacagaagagatgaaattagcggcagcatatgggatcgctaacatcattactgatgaagaacgtaatgcgaattatgtaatcccgaatccattagataaaagagttgttccaagtgttgcggaagcagtagcgaaagcagctattgattcaggcgtggcacaaattacgaaaataccacgttattaatagctaaaagcagtgcctaaaaggcactgcttttttgagataagaaatcaaaataatgaagaagtgtagaattatttatgtttcttcactatttatttaattccattgcaacttgtttaccattcactaaaacctcagttactgctacgattacttctatcatttttttcatctctcatctctcctcgcttcatttcttactttaagtataagagaagagagataattcaactatcgaagtacatgacgtagaaattacattgttgtaagaaagtggtttatttttgtcactttacttagcggtgattacaaactgatcataatatttttcattcacatagatatttaataaccataatccagatgaaggtagtgacatagcgagagggagttcgcttgtagtagaattgattgtatttgaagtagtccaagtttgtttggaaatttctttttgaaagagtactggtgttggagttacagatccttgttttagcgcaataatagacaattttccagtaggtatttcagaatctagaaagtaccacattatttcattttgttcatttgcgataataggactatcagccattgcgatttttccttcgatgccttttaaaggtatttttccgtctatgaatgagggggcttcttcccaatttacatcttttaaaacactaaggtgaaagaaggaaggtgcgttcacttgagtggatgaagttgctattacgtcttttttttgttcttttgaatccggttgagtttgtgtgcatccagtgatgaggagggagagaagtagcatagttccgatttttttcatggtgccacactcctagtttttattgttagtgtaattgtatttgctagaaggcgggacaattcctttaaagtataaaaagaggtcgtaagttttgtacgacctcttttgacattttttatcccgtaaagcccgattggtgtaggttaataatcagtgggagatagccccactaattaaagtttcattttatatttgttccgttgtataggttggttcggtttctttttgaggcatcgtcaaaaaaataacggacagaacgatacatacgccgcctaataattggtatgctccaaaagcttcatttagccaagtgattgaaacgatggcagctacaaggggttcaatgctagataaaatgcttgtttctgttgctgctaaatatttaagactaccgatatatagaaggaaagaaagggtaccactaacaatgataagaataagcatagaaaaagttttcagtgtaagggtttgtgaaaattgattccacccgaatgaacgattataaataagtagtgcaattcctccgattaacattccccaaccaattactacagttgtcccgcattctttaatgagagaagccggatgaagggtataaaatgcaaatccgattgctgttaatagtccaaaaataatagcttctttagataaaacaatattttcaattgagccatttgtaataataaagtatgttcctattagcgcggctataattgcgaatagttgcatggaagcagggaattttctttgttcaaatgcaacatacacggtaataagaacaggacctagaaattgaaatagcgttgcagtgaccgcgttactaatatgaaccgtttcgataaaggcgtattgtgcaccgagcatgccgagaatagaaaaaataataagttgtatagaatatctaaggtgtttccaaatttgaaatatgttttgtttctttataagtaagaaagacaaaataaatattcctgcaagcaacaatcgaattgttaaaaaatcaattgaggatacattagtatgctgaaatagccactgaatcattggaccagataatccccataatgtagcccctgtaataatcataataagtccgatacgtctaccgttgttcattatcatgtttctcctctccagtatttgatttttgatgtgtgacatgataaaaggaattatatatataatctggtactgtaaaaagtatcagattttagttttattaaggggtcagatactatgttagaattaacgcctaatttaaatatgaatagtaaaaaggcattatatgtgcaattgtatgagtatataaaaaaagagattaaagatggatcaattgtcccttttacgaaattaccggctaagcgaaagttagcgatacatttacaagtaagtaaaaatacagtagaggcagcgtacgaacaattacttgcagaaggttatattgagtcgatatcgagaaaaggttattttgtatgcaagattgagcaaatggttcatgtagaggatagcgaagagaggatagaagaagtcccgtttcaggagaagcgttataaatttgactttacacaaacaggaattgatacaaatgcttttccatttaatatgtatcggaaaattgtaaatgaagtatggcagccgcataataacgaacttctctttctaggacaccctcaaggggaagcaagcttaagagaagagattacgaattatttgtatgaatctagaggtgtgcgttgttcagctagtcaaattgtattaggagcgggaacacaaatattagtgaaactattgtttcaattgttaaagggaagcaattatgcagttgaaaacccagggtatcatagaaagatggttgtttttgaacagggagaagcaagagtccaaatgttatctttagatagagatggaatttgtattgcagatttagaaaatagcaatgcgaatgttgtatttgttacaccttcccatcagtttccatatggaatgattatgcctattacgagaaggatgcagcttttacaatgggcaaagaaagaagagagcaggtatattattgaagatgattatgatagtgaatttcgctattctggaaagcctataccggcgctgcaagggttagatacagaggggaaagttatttatatggggacgctatctaaagcattattgccatcgctacggatgagttatatggtgttgccgaagaaattaattaaaaagtatcaacagcaatatttattttacacacaaagtgtttcaagaatggaccaagaagtgattagaagatttttaaatgaaggctattgggaaaaacatattcataaaatgcgtgtcgtctaccgaaagaagagagatcgacttgtttttgaaatagagaagtatttctctaatcgtgttaaagtgataggagaagattcgggattacacattttattaaaagtgcataatggaatgcgggaagaagaattaattcaagaagctgcgaaatatagtatcaaaatatatcctgtgtctacgtactataaagacggtacggcgcctgagagtgtagttttacttgggtttgcgatattatcagaggaagagattgcgaaagcgattcaattattacacacggcatggtttacaagaaagtaaaaaacatcctccaaacatgaggatgttttttattatttattttcatctaagaataagaccatatgctcttcgtcccaatattgtccgttatattttaatgaacgttcttgtacaccgaatgttttaaaacctaatgattcataaagttttttcgctccatcgttgccaacaacaacatcaagcataacttgttctacttctaaagatttagcaagttcaagacattctttaataagtgcttttcctgctccaagtccgcgtgcttttggagatacatatacagaaccgattttagctttatgttcttgttttacatatggtttcgtttccagcgttgcaaccccgattaattttccatctttaaatgcacctagcgtatagttttcatcttgtgctaatttttgtgctttatattcaatcgcacactctttattaataatatcttcataagaagagctgaatgcttcagggttttgctttaatccttctacgcgaagttctaagtaaatttctgcttcgtcttttgttaatacatggatatccaattatatcaccctccaaatctttgcaaatgtacctttattttatattgaaataagaataatttcaaaagcttagcttatatgagctgtttttatgaacaaaataacaccagtagtgtttactactactggtgttttcacacgcatattattcaaaaggtagctcgattataaagtttgttcccgcttctaattggcttgttactagaatagaaccgttatgcaattctacaatttcctttgcaacagctagcccgatgccttttccgcctgtagctcgtgttctggatttatcaacacgataaaaacggtcaaaaatatgcgggatatcttcttcaggaataccttcaccttcatcttgtacacttattgtaaaagaatatgtttccatgagtacacgtatcgtaatggatgtgttttctggcgaatgttgataagcgttgtgtaataaatttaacataacttgttccatacgtctttcgtctatacaaacttctaaatcatctttgcaatatacatgaagttgcatttgcttattcgttaatgttgtttttgttttttcaaccattcgttctaaaaatggctgaagaagcactttttgtttttttataacaaattggtgttgttctaattgtacaagcataaataaatcttggacgagatcggttacactatccgtttcatcctcaatgatttgtaagtattcttctcgctcctcttttgttaaagagtctctctttgctacctttgcataacctttcatataggtcaatggagttaatagttcatgagcgacactagcgagaaattcattgcgctcttttttcatatacgtaagctcactcgataaatcttcaattgtttttgctaaacttccgagttcatcatttcgtttaatacctaattgaattggcttgtttaattttgacattttttctgtcgctctcttcatttttataagaggatctgtaataaatttagaaaaaacaaagacagaaatagttgttaaaataatcgtcaaaatactaatgataagaaattgatgcaggagtttaagtaacatcttttctaagaaagatgtttttaataacatatgtaaattaccttgaaatccttgaatttcaagtggacttactgttgagatgaattttgattttttccagtttctttctacaattaacccgctttttggaatagattttgttttacaaataagttgtttttgcatttctttcgttatgggttctgagttagaaataattttgccgttattgtcagttataatgattgtgatatcagtattagcaattaattcggaaccgattaaatcttcagccgcatgctcgatagtgaaatcctgataccgagggtgtttaggacgttctgtgtattgctgttgtttagaatgatcattccatcttgcacggtttacaatcttatcacgataccgattacctttctctaatagagcatcggtttcttctttcacacgcattgttgaaaggcttttataaaaagatacgaaagcaattgtttcaatacataaagctaatattaaaaagtatgtcccaattttaagggaaagtttactcattttctcaccataccttattcataataaagagtcagtggtatacgatttcccactgaccgaagtaattattcacttttccatttatatccgactttatagaccgtttctaggtaatcttcaatcggaaatccttttttgcgtagtttatcacggatattacgaatgtgtgaatcaattgttctatattcgatatctgtttcatagccccaaattttttcgattaaatcatctcggctataagcacggtttgtattttgcaaaaatagtccgagtaacgaaaattcgataggagttagcgagattttttcatcgtacactgtgacggtatgtttcgttttatcccactcaataccattgaaactaacaaagccatctttttttgtacggcgtaatatagcctcgattcgtgcgactaatacatgctcatcaaatggttttgtaatataatcatctgcgcccatcgtgaggcctttcaccatatcgtagttttggttgcgagctgttaacataatgataggaacgttagaaatttgacgaatttgatagcaagtatcccatccatccatattcggcatcataacatctaataaaataatatcgaattctttttgttcgattaattttagtgcttcaaggccagaggtagctttcatacaaaaatagccgcgagggcttaagaatagatctaataatcgtaacatacgttcttcatcgtctactaataaaatttttaccataatcttgtgcaccccaaactgttcattctacttgtatagtttacatgaaaataataaaaaactctttttatgtgattgaatggagggatgattttttcgctcggagtaattgacataaaaaatgcactagttttgcacaactattttttataataaaaaacgtagcgacacaaaataccctatgttgcgacataacgtcatgtcattttatttataaaatgacaattccattctattgtgtatgtgagatagagagggttttcgtattcacctcgcatcggataagaaaaatttcctatctcacactttttttaaaaggagatcatacacatgaatccaaaagaagaaatttcaaaaaaagaaaagcaagatcgtaatacggttgtcatgtgtgttgccgtatctatggttattattataagttgtgtaaataaaattttagggattttataaaataaaaaagctgattgcttcttaagaagcaatcagcttttttcattgttaggggagtattcctatatgataaaccaaggtaaaattgctaacccagaagttacaattgctgtagtaaatattaaaagcatagctcgtttgttttgtttcatgtcacattctcctctatatatcaagtacatgcgatcagcgtgggatgtagttccccactgagtaaagtttcactttatatttttagtataataaatggtaaggattggtacgatcgataaaggtgacatgaagattacattgttgtaatgcaaaaaaacatctttcttattaagaaagatgtttttggaaaactaccccgctatttgtgggcagtaactcccatcttaaaattcagcgaatgcgagggagttaggtgggcgataactgcccgtaaaagcccgattgattcagctaatactcagtggaggatggaaaaatcacccactgagtaaagtttcactttatattgaagtattaatcatttaagaacagaaccatatgttcctcgtcccaatattgaccgttatgttttaatgaacgctcttgtacgccgtaagtttggaaacctaatgactcatataatttttttgctgcatcgttaccaactacaacatcgagcataagttgttctacatgtaatttatcggcattttcaataattgctttaattagagctcgtcctgctccaaggccacgcgcttttggagaaacaaaaacggaaccgatttttgctttatgttcttgtttaataaatggttttgtttctaaagtagcgataccaattaaatcattatctttgaagacacctagagtatacttatccggattgcttaatcgtttagccatagcagccacaggattttcatgtttaagaacatcttcataagaagagctaaaagcttccggattcttcgttaaaccttccatacaaacttttaaatatatttctgcgtcctctgttgttaataagcgaatttccatagttgtaacctccctggtggatttcaaataaatccattacttttataagattgagtatatgttttgttagtattctcttttaatttgtaaaagaatgaaaagatatatgctacaatgttttgttttaattatgtaatgaaattatatattaactttgttaactattcaagtgtttaatatgttacatttttataactaaaataactcctcgattgaggagttattttttaaacattggattgatagccatcaattcgttttggatgtgtgtaaatattacaagattcatttctaataaaccctacgactgtaatgcctaaatcatgggcaagttgcaatgccagttttgttggagcggatttagatagaacaatttcacatccgatttttgaaactttgagtaaaatttcggatgaaatacgtccgctaaatgcgatgatttttcctttaatggatatatcgttacgcaaacaatgaccatatattttatctaatgcattatgtcttccaatatccattcttgataggaggatattgtttcgatcacatagcgcggtattgtgaacaccgccagtttggcgaaatgtagtagaagattgttgcaaggtattcattaaatgaaagcattcttcaggagtaatttttacatgtatatcatgtaagtcttttgcttttgctgcgtcgtttacgaaaataaaaccttgtctaccttttccgcagcaagaagtgatgtatcgtttattatataaagtttgatagagcggattcacttttgatgattttacatggacaattccgttatctttttgaacccatagttcttcaacatctttataggaagaaataatcccctcagaaattaaaaaaccaattaccatatcttcaatataatttggtgtgcatacgactgttacatattcttcaccattcaatttaatagtaataggagattctgtaacaatctcatcaagttgttttgaaaatgtaccagattgataacgtacaattgtataagtctcttgcgtaggccccatatttaattccccttttatatgtatttctctcccacatttatcataaaacaatggaaaaaataaaaacacctattaaaaagaagatcacagattattttggttattattgtatatgtacgatataatagaactgtagaatagtgatattttcaagctttcgtagttataccttataacatctagaatcgacttcataagaaagtatttgggtagagcgtttcaaaaatatgtacagtaatgcgattttgaaaacggattcataattgtgttgtacagttggttgtaaggagaggggaaactatggcagaacagacagtccgtgtaaccgtcgatggtaaagaattttctgcatcaggtgaaaagacgatactacaattatttaacgagagtaatttggaacatcctcaaatttgtcatgtaccagaagtagatccaattcaaacttgtgatacgtgtattgtagaagtaaatggaaagttattgcgtgcttgttcaacgaaattagagaacggtatgcatatcgaaagacagtcccagcgtgcaaaagaggcacagactgaggcaatggatcgaatattagaaaatcatctattgtattgtaccgtttgtgataacaataatggtaactgtaaagtccataatacagtacatatgatgggaattgaggaacagaaatatccgtatgagccaaaagtaagtgcgtgtgaagtggatatgtcacatccattttatcgatatgatccaaatcaatgtattgcttgtgggcagtgtgtagaagtatgtcaaaacttacaagtgaatgaaactatatcgattgattggagcttagaccgtccacgtgttatatgggacaatggtgtaagtataaatgactcatcttgtgtaagttgtgggcagtgtgtaacagtatgtccatgtaatgcgttaatggaaaaaacaatgctgggtgaagctggattcatgacaggattgaaaccggatgtgttagatccgatgattgattttgtaaaggatgtagagccgggatatagtagtattttagcagtttcagaagtagaggctgcgatgcgtaagacgaaagtgaataaaacaaaaacagtttgtacattttgtggtgtaggttgttcatttgaagtatggacgaaagaccgccacattttgaaagtgcagcctgtttcagatgcgccggttaacggtatttccacatgtgtaaaaggcaaatttggatgggattttgtaaacagtgaagatcgtattacaaagccattaattcgccaaggagatacgtttgttgaagcttcatgggaagaggctctggaagttgttgcatccaatatgcagcatattaaatcagaatatggaagtgatgcatttggatttatttcttcttcgaaagtaacgaatgaagaaaattatcttatgcaaaaactagcccgtcaaatatatggaacgaataatgtagacaattgttcccgttattgtcaatctccagcaacagacggtttatttaaaactgtcggtatgggcggggacgctggaacagtgaaagatattgcggaagcaggccttgtcattatcgttggagcaaatccaacagaaggacatcctgtacttgcaacgcgtgtaaaacgtgctcataaattacatgaccaaaaattaattgtggcagaccttcgtaaacatgaaatggcagagcgtgcggatttattcattcatccgcgccaaggaactgattacgtatggctcgctggtattacgaaatatattattgatcaagattggcacgataaaaagttcatagctgaaaatgtgaagaattttgatgaatatagcaaaatggtagaaaagtatacgcttgattatacagaagaaattacggggatttcgaaagaaaatctgaaagaaatggctcgtatggtatatgaagcagatggtacttgtgtactttggggaatgggtgtaactcaaaatactggaggaagtacaacttcagcagcaatttcaaatctattgcttgttacgggtaactatcgtcgtcctggtgcaggagcatatccattacgcggacataataacgtacaaggcgcttgtgatatggcaacattaccaaactggcttccaggttaccaagcggtttcagatgatgcgctccgtgcgaaatttgaaaaagcatacggtactacaattccgaaagcaccaggtttaaataatattgcaatgttacttgcggcagatgaaggaaaactgcgtggtatgtatgttatgggtgaagaaatggctttagtagattcgaatgccaaccatgtacaacatattttagcgaatttagatttccttgttgttcaagatatgttcttatcgaaaacagctcgttttgctgatgttattttaccggcagcaccaagcttagaaaaagagggaacatttacgaatacagagcgccgtattcaaagattatatgaagtattgaagccgcttggtgattcaaagccagactggtggattttacaaaaagtagctcgtgcacttggcggggactggaattatgaaaatccaagtgaaatcatggatgaaattgcatcgcttgcacctttatattctcaggcaacatacgatcgtttagaaggatggaatagtttatgttggggtagccatgatggtagcgatacaccgctattatatgtggacggatttaacttcccagataaactagctcgtctatcattagatgaatgggtaccaccagttgtagcaccagatgagtatgatttacttttaaataatggtcgtatgttagaacatttccatgaagggaatatgacgaataaatcggctggtattttatctaaagtatctgaagtgttcgttgaaatctcgcctgaacttgccctagagcgcaatgtgaaagatggtggccttgtagaattagcatcaccatttgggaaaattaaagtacaggcacttgttacagatcgtgtaacggggaaagagctatatttaccgatgcatgcaacggtaaatgaagaggcaatcaatattttaactggaacggcgacagatctttatacgtgtacaccagcgtacaaacaaacgatggtaaagatgcgtgtactacgtgaaaaagggaatcgtccgttaccatcttcaaacccgagagataaaaagcgtaatccgcaaaatggtgttgaaatccagcaaaaatggcaaagaaaacaatacgtatcacttgtggactagggggcggagatagtggcgaaagaaattactataattaaaaagaaagttgtaacagaggaagaacagaaacagcaattagcagatgaacttctaaatgagctatctaataatcgtgaagcagtagaagaaacgatgcagcttttagcacagttgcagaaggctggcatattagatgcagcgattagtttacttgctgcgaaggaagatgtttcaaaaatcgctgtggagcaattaaatcgtgaaccagttaaaaatgcactcaacaatatgatgggggcaggagaagcgttatcttcagttgacccagaaataacgaagcaaattacgtccagtttagttacaggattgcaatttgcaacagatgaattaaatagtggtaaaaaaacaaaagtgatggatttctttaaagtattaaaagatccagatatcaatagagctattacattcggttttagcttcttgaaagcatttggacaagggctagagaaaaaatagaataaatgaaaaagtgatgggaagtagccatcacttttttcattatatgtataagagtgttcatgttaagcggaatatattattattaaaaagatggattagaactggaaatatggaatccatctcaaatatcgttttagaatgtggaggaatatatgcaacaccgtaaaaaactatctataccaggagtaataggacattcctttcaaacagttaaatttgctttttggaatgtattaacttttcaacttgcttataaattattagcagcgattgtgtttgttccactatttggaatcatttttaataagttattgtattttggtggttatgcaaatgcgacaaatgatgaattattagcgtttttaaagacgccttatgggatcttagcaatcgtaattttatcattgttagcactgtttcttatctttacagaatttgcggtgcttattattatttcgtatttcgctcataaaagacagaaggtgaaattacgtccgattttatataaaacggtaacgtatttacctactctttttacatattgcttaccaggatttattttatatgctgtcgtattgttgcctcttttaaatatgggatatgaaacggcattaatcccgcaaattcaaattcctaactttattacaggagaactgtttaagacaacgatgggacaagttggttattacacgttctttgctgtagtcgcgtatttgaatcttcgatggattttcgttctacctattgttgttttagagcaaaaaccatttcgcgtggcagcacgtaaaagtgcaactttagtaaaggaaagcttttttaaagtactattctttttagtagggttttttatttcaattggaattgtatatgtcgtgtttttgggaatatatttattgtgcctatggggtgtttatgaatttacaaacccgaaaggaacatttgcattattagctgaatcaacgatttctgtatttttaacgagcacattgtatttattcagctttatcgtgacgccattttatattatggcgattacgcgattatacttacaaaaggtaccggttgaggatgttttattagaagaaggattagattattcgaaaacgaaagcagataaatgttttttccaaaaacatcgttggaaattcattggcgtatacattgtaggaattattactgccggaatggtcgttgccttcattgtaacgtttatttcaaattcgtataaagaaccgattattatggcgcaccgcgggtatatatcaaaaggcgtagaaaatacgaaagaagctgtgcaaggtgcgattgatgcaaaagcagactacgctgaaatagatgtattacaaacgaaagacggtgaactagcggttatacatgatttgaagctgaaacgtctcgcaaatgccaatgtgcatgtgtcagatttaacgatggcggagttaaggcaacttacccttagtcaagatggactttcaggacaaataagtacacttgatgaaatcattaagctagcaaatggcaaaatcaaacttaatatagaagtgaagcttcatgggggcgaaaaagattttgtaaacaaagtcttaaaaacgattaaagataatgaatttgagaagcaatgtgtaattcaaacgttacactatccacttattaaagagtttaagcgtgcaaatccagatataaaagtagggtatatattgtatgcaagtagagctaacttaaagaatgtgaaggctgacttttacgtagcagaagaatatatgttaaataagaaattagtaaaagaagcaaggaagttaaacaaaccaatttacgtatggacagtaaatgatatggaaaatttaaaggcatattataagttgaacgtagatggtatcataaccgattaccctgaagatgcacgtgaaacaattaagatgttaaaagagcaagaagcggaagaaagtgatctgtttgataaaattactgaaacgacagatgatttattttctaagttatttataagttacccagctgctggctaaatgctagtagctgtttttttgtgaaaagaatatatctctaaagtattgagtaaagtaataactgtatatgtatacgttatcgcttaggtttcttacattgttacattattgtcaaataataaatgattgctgtttattttgaagcagtataataaaaatagagtgaaagataatgaaatgacacgaaacacctaatagaatcaatgttttatatatttacactattctaaatataaaaactttagtaaaatggtatgttagcgttttcataacttttaagttatgctagaataaggacataagttattaattattacaaaaagaaaaaagaatctcttttttctgttaattataagggggcatttcattatgcgtattggggtaccagcagaaattaaaaacaacgaaaaccgtgtggcaatgacaccagcaggtgttgtacatttaattcgtaacaatcacgaagtattcattcaaaagggtgcaggtttagggtctggtttcacagacgctcagtatgtggaagcgggagcaaaaattgttgatacagctgaagaagcttggaacatggaaatggttatgaaagttaaggaaccaattgaaagcgaatacaaacacttcagtgaaggcttaatcttattcacatacttacacttagctccagagccagaattaacaaaagctttaatcgagaaaaaagttgtttctatcgcatatgaaacagtacaattagaaaaccgttcattaccattacttgcacctatgagtgaagtagctggtcgtatggctgcgcaaattggtgcacaattccttgagaaaaataaaggcggtaaaggtatcttacttgcaggtgttccaggggttaaacgtggtaaagtaacaatcatcggtggtggacaagctggtacaaatgctgctaaaattgcagttggactaggtgcggatgtaacaatcatcgacttaagtgcagaacgtcttcgtcaattagatgacattttcggaaaccaagtaaaaactttaatgtctaatccttacaatattgcagaagctgttaaagagtctgatcttgtaatcggtgcagtattaatcccaggtgcaaaagctccaaaacttgtaacagaagaaatgattaaatcaatggaaccaggttctgttgttgtagatatcgcgattgaccaaggtggtattttcgaaacaactgatcgtattacaactcatgataacccaacttatgaaaaacacggcgttgttcattatgcagttgcaaacatgccaggtgcggttccacgtacatcaactcttgcattaacaaacgtaacagtaccatatgcagtacaaattgctaacaaaggctacaaagaagcttgcctaggtaacactgcattactaaaaggtattaacacattagatggctatgtaacattcgaagcagttgcagaagctcacggtgtagagtacaaaggtgctaaagaattattagaagcagaaacagtatcttgctaatagaagcattatacaaaacaaaatcgaacaatatataaaacaacatgataagggctaagagtgaagatctcttagctcttcttggcaaaagggggcatacatcgtggccaacctatttaaaaagaaatccgttacgcaattgttaggggaaagtaaaagtaaaactttgacgaaaacgctaggggcatttgacctaacaatgctagggattggtgcgataattggtacaggagttctagtattaactggattagtagcagcaagagatgctggtccagcagttattttttcattcatgattgcagccatcgtttgtggatttgcagcattatgttacgcagaggttgcttctacacttcctgtttcaggtagtgtgtacacatactcatatgcaacaattggtgagtttgtagctcatttaatgggatggacattactatccgtatatgttgtaacgactgccgcagtagctggcggatggactggttacttccataacttagtgagtggattagggcttgaaattccaaaagcactgctaacgattccgtctcaaggtggtatagtgaatttaccagcagttatcgttacattagttataacttggttattatcaagaggtacgaaagaaagtaaacgagtgaataacataatggtattaattaaaattggtatcgttgttttattcattgcagttggtgtattctacgtgaaaccagaaaactggataccatttgcaccgtatggtttaagtggagttttcgcggggggagcagcagtattctttgctttcttaggatttgatgcattagcaacttctgctgaagaagtaaaaaatccgcaacgtgatctaccgattggtattatcgcttcgttagtcatttgtacaatcatttatgttgtagtttgtctcgttatgacgggtatggtttcatataaagagctagatgtaccggaagcgatggcgtatgtgttagaagttgtaggacaagataaagtagctggtataatcgcaattggagctgtaattggtattatggcagtaatttttgcttacatttatgcaacgacacgtgtattcttcgctatgagccgtgacggtttattgccagaatctttcgcgaaaattaataaaaagacagaagcaccaacatttacagtttggttaacaggaattggtagtgctttaattgctggatttatcgatttgaaagaattgtcgaatttagcgaatattggagcgttgttaacatttgcgatggttggtgtgtcagttattattcttcgtaaaacacatccaaaattacaacgtggatttatggtaccacttgtaccgatcttgccgattatttcaattgcatgttgtctattcttaatggtaaacctaccattaaaaacatggatgtacttcggtgcttggttagcaatcggagtagttgtatactttgtttattcgaaaaaacatagtcatttaaaagacgatggaagttcgcaggataatttagaacaagctaattaaagggatataaacacagtaagccttgtgcgtctagggagcgcgcaaggctttttcttttgttgaaataaagggaatgtatattattttgtcgaatttttctgtcggaatatgaaaaaagggtgggagcgaaatggaagaagcaaaagttgttgttggagcagagggttataataataaccctggttggttacatacgaatgaagaagaattaaatttattacggagagaagcttggcttgataaatttcaacctaattctttatcagtaattttggcagaacatgtatgggagcatttatcatatgaagaaggaattgaagctgcaaaaatttgttatgagtttttaatggagaatggatatattcgttgtgcagtaccagatgcattttttccagatgaagaatatcagcaaggggtacaagtaggtggacctggtccattagatcatcctgcagcaagtcataaaattgttcatagctataaaacaatcacgtccatgtttgaatcagcaggttttcaagtaaggctcttagaatactgtgatgagaatggtaagtttcactataatgattggaatgagaaagatggatttatttatcgttcgaaacgttttgaccatagaaatcgggataatcatttaggatttgtttctttaattgtggatgcggtgaaaaatgaaaagtaagtaaaaaggggggtgcgaattgtgcatccttttttgtatgagaatatagagagtgcgaaaaatatgtatacgacttattaaaatgtgaacggaatgttcataaaaaaaattcagatttcattgacacatatgagtgggcgctcatataataagagtataagatatatgaatgattgttcatatgttcaattaaagaggtgagctataatggctggaaataaagtagaaacaccacaagagacatgttctcaaacgataattcatgaagaagttgtagagcaagtaaaacaaacaattccaactgatgaaagtttaagtaaagtagcagaactatttaaagtattaggtgaccgtacacgtacgagaatattacatgcgctatttgaagctgaaatgtgcgtttgtgatttagcttatttattaggaatgacacaatcatctatttcgcatcagcttcgtgtgttaaagcaagcgaaacttgtgaagaatcgtaaagaaggaaaggttgtttattattcgttagctgaccagcacgtaattcatatcttcgagcaagcgtttgaacacgtaaacgaagaagaataaaagaacgcgaggagggagaacgatggctgaagcattggtgaaaaagaaactgatgttagaaggtttagattgtgcgaactgtgcaatgaaaattgaaaaaggtgttgggaatatagaaggagtaaattcttgctctgtaaacttcgcaacaaagacaatgatcttagaaacagcacaaaataaagaaaacgaagttgttacggaagcaaaacaactcgttacaaaattagaaccgcatattaaagttcaagaagaacaaaaaaataaaattgctaaagaagtatttatattagaaggtttagatcgcgcgaactgtgcaatgaaaattgaaaataaagtgaaggaaatgccagctgtctcagaagcaactgttgatttcgtatcgaagaaattacgagtagaagttgcgaataaaagagaactagaagcgactgtagcaaatataacaaatgtcgttcaaaagttagaaccagatgtgaaagttgttcgtgaagagaagaacggtcatgaccacggacatagtcacgatcatggtgaagcaaatgtgaaaaagatggtagggagattagtggtcggcggaattttgacagcaattgctgcattagcgggcttaccacaaatggtaacaattccgttatttgtccttgcttatttattaataggtggagatatcgtttggagagcgataagaaacataactcgtggccaagtatttgatgaaaacttcttaatggcaattgcaactgtaggagcttttgcaattcaacaatattctgaagctgtagcagtaatgctattttatcaagtaggagaactattccaaagtattgcggtaaaccgctcccgaaaatcaattacttcattaatggatattcgtcctgattatgcgaatgtaaaggttggaaatgaaacgaaacaagtatcaccagaagatgtacaaattggcgattatattatcgttaagccaggtgagaaggtgccgttagacggaaaagtaattgaaggaacatcaatggtagatacttcagcattaacaggtgaatctgtaccacgtgaagttgaagttggaaatgatgtattaagtggctttgtgaaccaaaacggtgtgttgacaattgaagttacaaaagaattcggtgaatccactgtatcgaaaattttagatttagttcaaaatgcaagcagtaaaaaagcaccaacggaaaactttattacgaagtttgcacgttactacactccagttgtagttattacagcggcgatcatggcgtttattccaccacttattttagaaggagctacattctctgagtggatttatagagctttagtgttcttagtaatctcttgtccatgtgcgttagttgtatccattcctcttggattctttggaggtattggtggtgcatctaaaagtggtgtgttagtaaaaggtagtaactatttagaagctttaaatgatgtaaaatatattgtttttgacaaaacaggaacattaacaaaaggtgttttcaaagttacaaaaatggaaccgagcgaaggtactacaagtgaagagttattagagtatgcggcatttgctgaagtatattctaaccatccaattgcccaatctattcgaaaggcatatggaaaatcaattgatgaaaaaataatcgatgattataacgaaatttctggtcacggtacagtcgtaaaagtacaaggaaaagaaatttttgcaggtaatgcaaaattaatgagaaaagaaaatattgaatttaagcaaccagaaacagtaggtacattagttcacgttgctgtagatggaagatatgcaggttatattgttatctctgatgaggtaaaagaggattcgaaacaagcgattcaaaagttaaaagaactaggtattaaaaagacagtaatgttaactggtgatgcaaaaccagttggtgaagctgtcggtaaagaattaggcttagatgaagttcatgcggaattactaccgcaacaaaaagtagaagagattgaaaaaattgatgcagcgaagcacggaaaagaaaaaattgccttcgttggtgacggtattaacgatacaccagtattagcccgtgcagacgttggtattgcgatgggtggtttaggatcagatgcagcaattgaagcggcagacatcgttattatgactgatgagccttcaaaaattgcgacagctgtaaaaattgcaaaacgtacaagaagtatagtgtggcaaaatatcatctttgctctaggtgtaaaagggatcgttttattacttggtgcttttggtattgcaacaatgtgggaagctgttttctcagatgttggtgtgacactacttgcagtgttaaatgcaatgcgtgtattaagagtgaaagatttataaaaaagaggacgcgacccgcgtcctcttttttattggtgattttgttgaaattgactcaataaaataataccaaatattattttacttttaaatagcgttatattaaaatttacaaataaaatacattcgtcttattcttttaatatattttttacaaatatccatatagtattgaaaaaacagagaaggggaaacttctctgtttacttttgtatgtttttttcgacttgttctcgaactgtttgaatgtaattcattttatgatcccagcactcttggcttaaatcgacagggtattcttcaggatttaaagttcgcatatattcttcccaaaatagagagagactctgttcattatatttttgaatatctaatatacttggtagttcatatgttctttcaccgttaacgaaaatatctttatgcagttcacgggcttcaaagtttgttacgaatttacttatatatgtgtgaactggatggaacatttttaagcgctcttcttttccaggttcttcagaatctaatgcaatataatcgccttctgcatgatcatttacccgattgataatacgataaattcgtttcagtcctggagtggtaattttttcagggttagatgaaattttaatcgtatcatttaattttccgtcagtatcttcaatcgcaactagtttgtaaacagcccccaatgcaggttgctcaaaggacgtaattaattttgtcccaacgccccatacgtcaatttttgctccttgagatttaaggtgcataattgtgtattcatctaaatcgctagaagcgataatttttgtatttgtaaaccctgcttcatctaatagttttcgtgcctttttcgataaataagccatatcaccactatcaagacgtatgccatagaaatcaatacgatccccaaattcttttgcaacacgaattgcatttggaacaccagatttcaatgtgtcatatgtatcaacgagaaagacgcactttttatgagtttcagcgtattttttaaacgcgacgtattcatcgcgatatgcttgaacgaaagagtgagcgtgtgtgccagctacagggatcccaaagcgtttcccagcacgaacgttgcttgtagaggagaaaccaccaataaaggcagcacgcgtcccccaaagggcagcatcgaactcatgggcacgtcttgtgccgaactctaaaagctcatcattacttgcagcatgtttcatacgtgctgcttttgttgcaattaatgtttggtaattcacaatatttaagagggcagtctcaataatttgtgcttcaccaagtggtgcatcaacacgtaataaaggctcgttattaaatacaacttcaccttcttgcatactacgaatcgtcccagtgaatttcatattttgtaaataatgaaggaattcttcttcaaattgtaattctgctaaataagcgatatcgctttcagtaaaactgaaattttcaatgtactctacaattttctcaaggccagcaaaaacagcgtaaccgttctcaaatggaagctttcgaaaatataaatcaaaaacagaacggcgattatgaataccatctttccaatatgtataagccatgttgatttgatataggtctgtatgtaaggcataactatcgtctttataatgagtcatcgcgagaacacctccataatttggttatagtataccaatttttcaccattggtagcaaagaagagatattgatgtgaagtcaagagagaaaaaaatgaaattatgcatattttttagaaaatttatatttatcaatttatatttctccaaattttatgtattattagagtaatggggtaatgagaatggaggaggacaatgcaacaaacattagaaaaaataggcaaacaagtcttttacaaacggcttcagcaaaaaatgacacaagaagaattatgtcagggcatttgttctgtctcatacttaagtaagatcgaaaatggaaagatcgaagcatcagaagaaattctacaattgctctgcgcaagattagaaattgctgtgacggatttgagagatgtagaagaagatgtgaaggggaagctggatgaatggttgaatgcactagttcatttggacaagcaacaagtagaacgtatatatgaagagttgcaaggtgaaatgaagcatgtgttggattttgaaattataaattattataaactgctgtatacacgttatttaatgatgaagcgagatctacctgctcttgaagaagaattggacagattgaagaaagtgtacaagaaatactcaccctttcaaaagttattgtatacgtacagtaaggcattattacttagtttgcaatataagcataaggaaagtttaaaatatttaattgaaacagaagaaatggctaaagagcaaggatattatgaaacggggatatattataacctaagtcttgcgtatagtcatctaaatataccacatttagccatgcattttgctcatattgccatggaggggttccgtaacgaatataaattccgttatgtaataaattgtcaaacgattattgctttaagttatgttgaaaaagcacaatatgaagaagctctaaagatttatgagagtatattaagagaagtagattcttttgcggaaaaagatatgattaaagctatgactttaaataatatgggggaattataccattataaaaatgagcatgataaatctaaagactattttcttcaaagtttcgaattgcagaagactgtcaatatgaattatattgaaacaatttatggactggctaagcaatacattcatcttaaacgttatgaagaagcgcaggaatggatagaaaaaggaattgattgctcacggagtgatgagaaatacaataaaatgatttattcattctgtatatttaagtataaatattttggagaatctcaagaatttaagagatttttagagaatgaggctattccgttttttaagagtgtaggtagtatgaaggaattaaaaaatgcttatttagaattagctatgtatttagagaatgaatttaagtatgaggaaagtaataaatattataaagaagttattaaagttttagaagaaaaggaggaattgaattgaaaaagcgcatttatggtgcagtagggcttggaatagtagcgattctttctttaggcgttaattattcaaatccagacatatatggggtaaagtctttaaaagaaggctcagtaaattactctaatccagatatttatggattaaacgctttaaaagaaagtagtataaaatattctaacccagatatttacggttttaaattttcagaagaaaaggttataaattactctaatccagatatttatggttaagaaaatattgaaaaaacccctttccaatcggaaaggggttttttcaatatttgttcctcaaaattctacaaaacttgagaaataaattaattgaatttttagtatattaatagtggaaacataatgctaatatgaaactactctttttcaaaaaattttttattagggggaaggttatatgaaaaagaagagtttagcattagtgttagcgacaggaatggcagttacaacgtttggagggacaggctctgcgtttgcggattctaaaaatgtgctctctactaagaagtacaatgagacggtgcagtcacctgagtttatttctggtgatctaactgaagcaactggcaagaaagcagaatctgttgtgtttgattacttaaacgcagcaaaaggtgattacaagctaggggaaaagagtgcacaagattctttcaaagtgaaacaagtgaagaaagatgctgtaactgattcaacagtagtacgtatgcaacaagtttacgaaggagtgcctgtatggggttctactcaagtagctcacgtaagtaaggacggttctttaaaagtattgtctggaacagttgcacctgatttagacaaaaaggaaaagttgaaaaataaaaataagattgaaggcgcaaaagcaattgaaatcgcgcagcaagatttaggggtaacaccgaaatatgaagtagaaccaaaagcggacttatatgtatatcaaaacggtgaggaaacaacatatgcatatgttgtaaatctaaacttcttagatccaagcccaggaaactactactatttcattgaggcagacagcggtaaagtattaaataagtttaatacaattgatcatgtgacgaatgatgataagtcaccagttaagcaagaggctcctaaacaggatgcgaaagctgttgtaaagcctgtaacaggaacgaataaagtaggaactggtaaaggcgtactaggagatacgaagtctcttaatacaacgttatctggatcatcttactacttacaagataatacacgcggggcaacgattttcacatatgatgcgaaaaaccgttcaacattaccaggaacattatgggcagatgcagataatgttttcaatgcagcgtatgatgcagcagcggtagatgctcattactatgcgggtatcacgtatgattactataagaatacatttaatcgtaattcaattaatgatgcaggagcgccgttaaaatcaacagttcattacggaagtaattataacaatgcattctggaacggatcacagatggtatacggagatggtgatggtgtaacatttacttcattatctggtggaattgatgtaattggtcacgagttaacgcatgctgttacggaaaatagttcaaatctaatttatcaaaatgaatcaggggctttaaatgaagcgatttctgatatctttggtactttagtagaattctatgataaccgtaacccggattgggagattggtgaagatatttacacacctggtaaagcaggagacgcgcttcgctctatgagtgatcctacgaagtatggtgatccagaccattattctaagcgttacactggttcaagtgataacggtggcgttcatacaaacagcggcattattaataaacaagcttatttattagcaaatggcggtacgcattacggtgtaactgtaaatggtatcggcaaagataaattaggtgcgatttactaccgtgcaaatacacagtatttcacgcaatctactacatttagtcaagctcgtgctggtgcagtacaagctgcagcagacttatatggtgcaaattctgctgaagtagcagcagttaagcaatcatttagtgctgttggtattaactaaggacttaacggatagctattaataaaatacctcaaaaataaagaaggagcctatgctccttctttatttttttctccattttttccacaaataaaacaatccaataacgcctgcgattgttacaacccacttcgcttcatttgttccgttcatgacttggtatgccgaatatacttcaatcaataaggccggtattttacctattgtactggcaatactgaaggagagtaatgacattttccctagagctgcaaataaagtaacgatacttgatgggatgaaaggtatcaatcgaaacgatagaacgagtagaaaggcctctctaccttctacataaagaagacgctctacctttgggtacttattgactttatcgtgagtgaacttttgaaggcccatgcgataaatataaaacgagataatagcccctaaggcctcacctgcgatcgaaatgattgtgccattggttacaccgaagagctgtatgttaatggcggttaaaaagatgctaggaataacacctaaaagactaatgatgatgttaattaagatactaagtggaattgcgattgaatagtattctgttaagaaattttgaatcgtttcagccattgtttaaaatcctttatctttttttgcattacaccacatttcgtttgtataggcaagggtaaatttacataatgtagaaaaacgttgataagaatggtgtttataccttatacaggtattatgtatataaaaacaggggtattttaaattatttttaaaaacactataaaaacctttgtataaaagagttttatagttatgttattggcgattttatctgggaaataattataaaatatagggggtatatattataaaaggcgaaaaatagagggttgatgaaattgcgcggtaaatatggaaaaacagatgaaaaaaatgaaaaatgatagattttttcgttgtgaaattgacttttagtgaagttgcgataataatcatggaagaggtgatatgatgaaacgaataagtagtcttttcttcagtagtttattggcattaatgctgatcttaagtggatgtgcaggaaaagaacaaaaatcagagaaacagacagggaatcaagctgcatcggtagaaaaaattagtgataatattttagatgaaatggaaggaccacctaaaaatggtcatacgattgaaagacatgtaggcaagtcagaagaggatttgaagaatcgcttgaagacagataaagtgtcagccgcaagtacatactatgataaagaaacagcgacgaaagctgtaaaagatagcttgaagcaacatgacaaggaaattcaagattggttaaaaaattctaaagaggctcgtctcgtattaaatacaactcattcattccctgttggaaaaacggtaataaagaaaaatatgagtgtaaaagacaagttagtaaaaactgttactgttttagcaagagataagtcaggggaattagggtttaagattattacttcttatccatctgataaataagaagggggagtacattatgtatacgacattacaatactttcttaaatcgtactgtacgttaagtattcatgaggatgaaatagtaagcgtgatggaagagtttattgaacaagaagacgaagaaattgttttgaaattacgtgatgaattaataaatatgaagaaaaagaacgcgtgggaagaggcgtgtgtattagctgcgaagcaaggaaatcgtatgtggtctttagaagaaacgaaagaccatcttgaaacttttttactattactgcaaaagaaaaaggcgtgatttaatcacgcctttttctttatactattcggttgatagtatctattcctttggggcgcttttatatacactttttgaaatttgtccatttgatattacttccccgttttgtgttacttttttatacgtaaccgctgtgattttatcactagtcctactaattacttgagaagaaacttcaacatttttaccagtatttgtaccgaaaatgcgtgtagtaatactacctccatttgaaaatgcttgaatataaatataattgcctgtattatttttaaattttaaatctggaccataatctgctactgctgcatcttgcccaagtggtaaataatttactggcatagaatgattgcttcgagaaacaattcctaaatcagcccttaaagcggcgctgtataaagtactactgacttggcaaactcctccgcctgcactttgtattactttaccttgtgaatatactgctgcagatttgtaaccatgtgcagcatcagttacgccaacgcggccgttaaaactaaatgtttcatcaggtgccacaataaccccacttaaagtattagctgacttatttacgttaaatgattgatttccgttacggccagccattggagtagaatattcagcaatgacttctttaatacccattttctgtatatcttctgtagaacgttctggttttatgaatgtaactggtaatgtaacatctgatttaccagtagtaatagcttcgtttgttaaactgtttagttttcctttatcaattttttctccgttttggctttgactaacatttactgttgagccttcaatgcttaattctgcattaacaggattttttaatgtttcattatatttatcttttataaaggtttcataagctgttgcatttaattgtggtgttaatttatagtcacgttttaattcaccgttttcagcttgcttgcgcattttgtaacgattcattacgtttccttcttgttctttgaagattttgtcaataatatctttctctttataatttacccctaaatctttccatgtgtaagtttgtttatcgttttggaatatgtaggtaagggatttttgatctaattcagttaccctttgattaataattgcttgaatatctttcttattttttccatcgagagaaataccttcaaatgtagtatttggtaatgcagtagtatctaattgattatttaatttggatacatattgatatcccccaacaccgcctacacaaagtaatatgcccccagcaattgcagaaccaatcagtattttacttagcttcatttatttccccccagaaatttatgtataaatatatgtattacattttttgtataaaaatgatgaaaataacattatgtacgtactagtatactattattttcactgtgtgtgtaattttttcataaaaaatgttacatcgctgtaataattgtcacttcttgtcacaatgtgtatgaaaaatatgttgaaaaatataataaaaaggctgtctagaatgatctagcagcctttttattataattttttatgttcatttttattcgtaacaccgagatgtttttgaagggtagttgaaatagtatcgacgcttttttcatttggcacgtaataataaataccacctatatatttatctgtaccttctacttgcattttttccatctttaaatttgaatccattgaattttttgtaattgtcatcatatcatcaaaagttaaattggtttttaagtctttatcgacagcgtctagtaggccaccgattttattaatggaattaagagatagtgccttttcagcaatggcctctaatacaagctgttgtcgttggccacgcatataatcactatcgatgtgacgagttctagctagtgccagtgcctcttctccatttaaatgttgacgtcctttttttagatgaattgcatctgcttcatctttactattttgctctgtgaattcaactggaacgtccacagtaatgccaccaagagaatcaacaattttaataaaggatttaaaattgaattttacataataatcaactggaacatctaaaaagttctctaccgtatcaattgtgctgtctacaccaccgaatacgtgcgcatgtgtgattttatcgtatttatcacgtgatttaatgtagacgcgtgagtcacgtggaatgcttacaagtttaacggatttatcgtttttattaattgttgcaagtaataacgcatctgttcgagttgcttttccataatctttttccctaatatcactttcatcaacacccataattagtacggaaatgttgtcggtcataggtttaacagctttttcacgtttactggacttttctcctcgacctagttcagcataagcattatttaagacggactttgctttactgtatatatggaaggagtagcctcctgctccaagtgctacaattagtaatggaataagaaggaaccaaagtaggcgttttttctttgagcgtccttttttggctcgcgtatcgttgttcgtgtcggatttcatcattttttctcctttaaaactatcaaagtgtatacatttagaagtgtattcaaacacataaaaaatattttacgctaaataaaagcgattgtacatgtataaaaaatagatgtcttgattatttatccggtattaacgagcagtaaaacgcccacctcaaagtccagtgaatacaatgaagttaggtgggagataactgcccgtaaatacccgattgatgaaggctaataatcagagtggggatagccccactctgattaaagtttcactttataagacacctattcgttattgtatacaaaagatagggataagaaaatgataaaattttacctaattacaacataatgcttacgataattgcagataaaatactaacgagagtagctccatatagtaatttaaggccaaacctcgcaacaacgtttccttgttcttcgtttagtccttttaccgcacctgaaataataccaatggaagagaaattggcaaaagatacaaggaaaacagaaataataccaactgtacggggagaaaggctattagaaattttactaaggtccatcattgcgacaaattcattcgttacaagcttcgttgccataatgctaccagctgctacaatttcagagcttggtacaccgataaggaatgcgataggtgcaaatacgtagccaattaattgttggaacgtaataccgaatataatgaggaacaagtcattaatacaactaattaatgcgacaaatccgatgagcatagcgccgacaacaatggctacacgaaaaccatcaagaatatattctccaagcatttcaaaaaagctttgtttttcacctttgatttctaaaatatcttcgtcatctttaacgtcgtaagggttaatgatgagtacgataataaaaccgctaaataaattgagaacgagtgcagttactacatatttaggttcaatcattgtcatataggcacctacgatagacatagatacggttgacatagcggaggcacaaagtgtataaagacggtgttttggaatttgagctaattgttttttcactgtaataaaaacttctgattggccgacaatggcagaggcgatagcgttgtaagattctaatttcccaagaccatttattttactaagaaagtacccgatccaatgaataaaaaatggtagtattttgaaatgttgtaatataccaattaaaacagaaataaagacgattggtaataatacagtaaggaaaaatggcatttcacctttatttgcaagaccaccaaatacaaaatttactccatcagcagcatactcgagtagctttgtaaacaaactggaaatgattctaataagtatgaggccgatttctgtatttaatagtaaataggttaaaattaactgtataataagcatgataaaaattggtttaaatttaatatgcttcttattattgctagcaatataagcgagcaagaaaacaataattaatccgacgaaaaaagtaatgaatttcatggtaagcccccatgcccatcaacttaagaatttgcactacccccaagtgtcaaaaaacgttattctttctaaaaagctagctagaaagattatactgtttaaaagtttgttcatttcaattaatggaaaaccgtagagtttctatccttaagttgatgggcatgtgtgaataccccaatatagtcaaactcgacttcgggatgtgttgcaagtgggacgatggaagacgataggcgatatagtgggatttcatgcgctatattgtaatgaaggatacgtattgtgtgctctaaattttgctttataacatggtacaggttgtcttctcgttcttgcttgctaagtttcttaaagcttgtaaacgtcattgttttggcaggagaacagtcccagagtgccattgcatgtgagacatatccaaaccgtataatcatatgagatacacctcttttattcattgtctttcctataaaaagaaagcaaatattgttccaatccattcctttcctctattgataagagaaggcgggtttacatcgctatatgaaagtacggatgcattctctagatcttcatgaaatttattttttactgtttgaatgaaatgtttattatataacaggcagtttatttcatggttaatatataaacttctcatatcaaagtttgccgttccgatatcacaaatatcatcgtccactataataattttggcgtgaaaaaacccttgttgaaatgcataaatattgcaaccagcctgtattaattttcggcagtacgggaattttgcttcccgaacgagagggtgatcagctttttctggaacaagaattgtgatttgaacccctctttctcttgcttttaataaggcattcataattttttttccaggaatgaaatatggcgtaccgatacagatttctttttttgctccgttaattaaatgtaaaaaagtatgctgtaaataagcaccatcagtcggaataaattgatgcaagatggtacctggttgttgttttggaaaataaagagaagcatccaataaattctgtttcgtatcatcaaaccaatcatgcaaaaattgcttttgtaaatcttgaaccccttctcctgtaagacgtaaatgatagtctcgccataatcctaagtgttcattatgccctagatactcttcgccaatattaaatcccccgatatagccggttttcccatcaatcactgtaatttttctatgatttctttgattggcagaaaagaaaggaagaggaaattttaccttatgacaaaatgaaaaagatacaccatgtttttgcagggagcgaatagcttcgtttgataaagaatggctgccaaatcgatcaagtaaaagtcgtacttcaattccttcctgagccttatcaatcagcaaatttaaaaattcacgactgattttatcgttttttacaatgaagaataaaatatgaatgtggtgctgtgcttgttttatatcagtaaataaagcgtcatataaatctttcccatatgtataaaggtgaaaatcactttgacgtaaagggaaagtgcgagagcttacctgttttaaatgaagaagtctcccgtatgaaaggtcaattgtaatccaaagagcaacggatattaacaaaagagataagtagagcatcagtgaattccctccttcgcattcttttcaccttcagtatgttacaaatgatacgggtagcacggctgttattataaatttctttagaggatagatgttgtactaattaaagtttcactttatcctgctttaacgggcagtaagcctttcacctcaaaaaatgttggataagtagaagttagttaggaaatcaactgcccgtaaaagcccgatgggttcaactaataatcagtgggggatgaaccacccctactgattaaagtttcactttatagtttcaccgaaataaacagctttatgaaaaaatgtgttgttctataacaaaaaactgttgactgaatgctcactcattatataatggggataggggatataattcagaaaattatatatttttgaagattcaaaaagaaagagggcttacaaagagaggggtagcataaaaatgaatagcttactgattattaattggctggctgccattgctgttattgcttatgcaggatatttgtttgtatatcttatacggacgagaatggcctacatacaattaggaaaaaaaattgagtttgaccgtcgttttaaagagcgttgggatctccttaaggtcaatgttttcggtcagaaaaagctgctgaaagataagaaaagcggcatcattcacgttatgttcttttacggatttattcttgtccaatttggagcaattgacttcgtttggaaaggactcgcaccaggatcacatcttccacttggaccactataccctgcatttacattcttccaggaaattgtcacacttgttattttaattgcagtattttgggcttttcatagacgttatgtagaaaagcttgttcgtttaaaacgtaacttcaaatcaggtcttgttcttatttttatcggtggtttaatgatttctgtgctacttggtaacggtatgggacttatatggcatggcgaggagctttcatggagtgaaccaattgcttctgcaatcgcttacgtttttagcgggataaatgaaaccgtagccatttcagtgttctatttttcttggtgggtgcatttactaattttgttaacgtttttagtgtatgttccacaatcaaaacatgcgcatttaattgcaggaccagctaatgtattcttcggtcgtctttcaaacccagggaagcttgaaaagattgattttgaagatgaaacgcaagaaacatttggtgttggtaaaattgaaaactttagacaaaatcaacttattgacttatacgcttgtgtagagtgtggccgttgtacaaatatgtgtccggcaacaggaacaggaaaaatgttatcaccgatggacttaattttaaaacttcgcgatcatttaactgataaaggagctgcggtaacatcaaaagcaccgtgggttccagtagttgccttcaataatacacaaggaaatcagttagcgatgatggcagctggaaaagggcaacaagaatcagcgtctacaacgctcgcttacgatccgagtttaatcggagatgttattacagaagaagagatctgggcatgtacaacgtgccgtaactgtgaagatcaatgcccagttatgaatgagcatgttgacaaaattattgacttacgtcgatatctcgttttgactgaaggaaaaatggacgcggaagcacaacgcgcgatgacaaatatcgagcgtcaaggaaatccgtgggggctgaaccgtaaagagcgtgaaacatggcgccaaggtgatgacgaagtaacagttccaactgtaaaagaaaaatcaaaagctggggaggaattcgagtatttattctgggttggttcaatgggatcatacgacaatcgtagtcagaagattgcgatatcgtttgcgaagttaatgaacgaagcaggcatttcattcgcaattctcggtaataaagaaaagaattctggagatacaccacgccgccttggaaatgaatttgtattccaagagatggcgacaaagaatatcgaagaatttgaaaaggcaggagtgaagaaaatcgttacgattgatcctcatgcttataacacatttaaaaatgagtatccggactttggcttgcaagcagaagtctatcatcatacagaattgttagctcagtgggtgaaagaagggcgcttaaagcctgttcacgctattgaagaaacagttacgtaccatgattcctgttatttaggaagatacaacgaagtgtatgaagcgccacgtgacattttgaaagcgattcctggagtgaatcttgtagaaatggcacgtaaccgtgaaacgggaatgtgctgtggcgcaggtggtggcttaatgtggatggaagaaacaacaggttcacgtattaacgttgctcgtacagaacaagcattagctgtacagccatccattatcggtacaggttgtccatattgcttaacgatgatcagtgatggaacgaaagcgaaagaggtagaagagaaagttcaaactcttgatgtgacagagattttagaacgatctgttatcggacagaaaaaagaagcgatgtagtttgtaagaatgtatacaactttagaaagaggtgcaatgattgcacctcttctcaacgtagggataccgagcgggcgctcagtgttaaaaaatgaaatgggggaaagaaacatgagtaaaacagttattttaagtgctgcaagaacaccagttggaaaatttggaggatctttaaaagatgtaaaagcgacggaacttggaggaattgcaattaaagcagcgcttgaaagagcaaatgttgcggctagtgatgttgaagaagttatatttggaacggttattcaaggtggacaggggcaaattccatcgcgccaagctgcaagggccgctggaatcccatgggaagtgcagacggaaacagtgaataaagtttgtgcatcagggcttcgtgcggttacgttggcggatcagattattcgtactggcgatcaatcactaattgtagctggcggtatggagtcgatgagtaacagtccttacattttacgcggagcaagatggggatacagaatgggcaataacgaagttgttgatttaaacgttgctgacggtttaacatgtgcattttcaggtacacacatgggcgtttatggcggagaagttgcgaaagaagatggaatttctcgcgaagcgcaagatgaatgggcatatcgtagccatcagcgtgcggtttcagcgcataaagaagggcgttttgaagaggaaatcgtgccagtaacgattccgcaaagaaaaggcgatcctattgtcgttgcaaaggatgaggcgccacgtgaagatacaacgattgaaaagttagcaaagttaaaacctgtatttgataagacagcgacggtgacagctggtaatgcgccgggactaaatgatggtggtgccgcacttgtattaatgagcgaagacagagcgaagcaagaaggaagaaagccattagcgacaattttggcgcatacagcaattgcagtggaatctaaagatttcccaagaacgccaggttatgcaattaacgcattgcttgaaaaaacaggcaagaaaattgaagacatcgatttattcgagattaatgaagcatttgcagcggtagcaattgcaagtacagaaatcgcaggaattgatccggaaaaattgaatgtaaatggcggcgcggtagcgatgggacatccaattggagcaagcggagcgcgcattatcgttacactaatccatgcacttaagcagcgcggcggcggaattggaattgcttcgatttgtagcggtggcggtcaaggggacgcagtgatgattgaagtccactaattaaagttcgagggtataaaatttattaacaattaagggggaagaaaaaatgggtgtacaaaacattgttgtaattggtgcagggcaaatgggatcaggaattgcacaagtatgtgcaatggcaggatatgacgtgaaggtacaagatttaaagcaagagcaattagatagaggaatggctatcattacgaaaaacttagcgcgccaagtagaaaaaggacgcatgaaggaagaagagaaggaagcgacattaaatcgtcttacagtaacgcttgatttagattgtgtgaaagaagcggatcttattattgaagcagctgttgagaaaatggatattaaaaagaaaatctttgcgaatctagatgaaattgctccagaacacgcaattttagcgacgaatacgtcatctctgccaattacagaaattgcagcggtaacgaagcgtccggaaaaagtaatcggtatgcactttatgaatccagttccagttatgaagcttgttgagattattcgtggtttggctaccgatgatgcggtatatgaagcaattgaagatattacgaaaaaaattgggaaagtaccagttgaagtgaatgatttcccaggttttgtatcaaaccgcattttactaccgatgattaacgaagcaatttatacgttatatgaaggtgtagcgacgaaagaagcaattgatgaagtcatgaagcttggtatgaaccatccgatggggcctttgacactcgctgattttatcggtttagatacgtgtttatacattatggaagtgttgcatgaaggattaggagatagtaaatatcgcccatgtccattattacgtaagtatgtgaatgcaggatggttagggcgtaaaacaggtcgtggattctacgtttacgaataaatgccccctttgttacaacatagtggtcttaccaaattatttaaaggatatatagcaaatggaggcggaatatatgaactttcgttttaatgaagagcagcaaatgatgaggaaaatggttcgggattttgcacagaaggaaatagctccctttgttcctagtatggaacaaggggtgttcccgaaagagattttgcaaaagatgggtgagcttggattaatgggtattccagcgcctgcaaaatacggcggggcagaaatggactttatttcttacattctagcaattgaggaaatctcaaaggtaagtgcaacagttggtgtaattttagctgtacatacgtcagttggaatgaatccgattttatattttggaacagaagaacagaagaaaaaatatgtttctaaacttgcaaccggggaatatttaggtgcatttgctttaacagagccaaatgcaggatcagatgcagggagtttgaaatcaagagctgtgaaaaaaggtgatcattatattattaatggatcgaaagtgtttattacaaatggtggtgaagcaagtacatacattgtattcgcttctacaaatccagaggcaggaaaaagtggtatttctgcatttatagtagagaaagatacacctggtttaatcattggaaaagatgaacataagatgggacttctcggttctcgtacagtacaacttacttttgaagatatgaaagtgccagctgagaatttacttggggaagaaggacaaggattcaaagtggcgatggcgaatttagatgttgggcgaattggaatcggtgcgcaggctttaggaattgctgaagcggcgcttggctgtgcaattgattatgcaaaagaaagagagcaattcgggaagccaattgcggcgcagcaagggattggcttcaagcttgcagatatggcaacaagtgtcgaggcagcaaggttactcgtatatagagcggcatctcttagggcacaaggattaccatgcggtaaagaagcatctattgcgaaattatttgcttctaagacagcggttgaagtcgcgattgaggcggtgcaagtatttggtggttacggttatacgaaagactatccagtagaacgatttttccgtgatgcgaaaattacgcaaatatatgaaggaacaagtgaaatacagaaacttgttattagccgtgctttataaaagggcgagggggagacggagatgcattttaaactatcagaagaacatgaaatgataagaaaaatggttcgagattttgctaaaaatgaagtggcaccaacagcagctgagcgtgatgaagaagagcgatttgatcgagagttatttgatcaaatggcagagcttggtttaactggtattccatggcctgaagagtacggtggaattggaagcgattacttagcatacgtaatcgctattgaagaattatctcgcgtttgtgcttcaacaggtgtaacactgtctgcgcatacttcacttgcgggatggccaatttttaaatttgggacggaagagcaaaagcaaaagtttttacggccgatggctgaagggaagaaaattggtgcatacggcttaacggaaccaggatctggatcggatgctggtggaatgaagacaatcgcaaagagagatggcgatcattatattttaaatggatcaaaaattttcattacaaatggcggtattgctgatatttatgttgtttttgcgctaactgatcctgaatcgaagcagcgcggtacgagtgcatttattgtagaaagtgatacaccgggattttcagttgggaagaaggagagcaagctagggattcgctcttcaccaacgactgaaattatgtttgaagattgccgtattcctgtagagaatctacttggaggagaggggcaagggtttaaagttgcgatgcaaacattagatggaggtcgtaacggtattgcggcgcaagctgttgggattgcacaaggggctttagatgcttctgtagaatatgcaagggagcgccatcagtttggaaaaccaattgcggcgcagcaagggattggctttaaacttgcggatatggcaacagatgtagaagcagcacgccttttaacatatcaagcggcttggcttgaatcagaagggcttccgtatggaaaagaatcagcgatgtcaaaagtatttgcaggcgatgcagcgatgaaggtgacgactgaagcggtgcaagtatttggtggttacggttatacgaaagattatccagtagagcgttatatgcgagatgcaaagattacacaaatatatgaaggaacacaagagattcagaggcttgtaatttctcgtatgttaacgaagtaggaacgaaagcgtaggtattttcctacgctttttccttccaaaaaataatagagagaggtgaagggaatggttaaacataatgtgcatgcatcggtgaaagatgaaaaattagttgcgttaagacgtgaacaaatgattaaaggtgcggtgcaactgtttaaacaaaaaggatttccgcgtacaacaacgagagagattgcaaaagcggctgggtttagtatagggacactttatgagtacattcgtaccaaagatgatgttttatatttagtttgtgatagtatatatgaacatgtaaaagaaagattagaggaagtagtgtgtacagaaaaagggagtatagaaagtttaaagatagcaataacgaattactttaaagtgatggacgaattacaggaagaagtattgataatgtatcaagaggtacgctttttaccgaaagaatcacttccgtatgtattagaaaaggagtttcaaatggtaggaatgttcgagaatattttagaacagtgtacggaaaatggaacatttacattaaataaaaaagaaatacagcttcttgcgcataatatttttatacaaggacagatgtggggatttagacgctgggcgctgcaaaaactgtatacgctcgaagaatatacagaaatgcaaattaggtatgtattgcaaggggcccatatgcttccgaaataaggaacagacaaattataattttactaccctataaaagtttcccgttttttttgtagcatatttgtgcgacttttgtttataatgaatagtatggatttttttaagcaggccgttatatataaggttatatttgatgaaaggaagtgccgcataagtggattttaagcaatattcaccagaagagctaaaagaatgttcaatgattgaagttgtacatagcgttttaggggataaaaaacaagcaacgacattcaacgagttggttcaagaaatcgctcaagtgctgggactatctcaagagcaagttaatgcgaaaatcgcacaattttatacagacttaaacatcgatggacgtttcattaatttaggagaaaatcgttggggactacgcagctggtacccatatgagcaaattgatgaagaaatcttgcctcaaccaaaaccgaagaagaaacgtaaagttgaagaagacggttttgacgactacattgaagaagacgaagatgacttcgacgatgcagacgtaagtgaagatgaagacgatgtagaagatttggacaaggttcttgaagaagaagacggagatgacgacgatcttgatgatttagacgaagatgacgacgacttcgctgaagaagaacttgagtatgatgaaactgaagaagaagaagaggaagaactgtagttcttgacttttcattatcgtccatgtagaatcatttttgggctctttaaaaaaggacgataatacttttaaagtgtaaatataaaagaaaattgctccctacttattactttttgtgatgaggggagcaattttcttttttgttttttgtttagaaaataaaaagagtctaacaataagatggatacagtgttatctacatacgttgcgctttgcaacggtgattatataacagcaaaatagaagggagctttttcatgactaagtatatttttgtaacaggcggtgtagtatcgtctttaggaaaaggtattacagcagcatctcttggaagacttttaaaaaatcgtggtttaaacgtaacgattcaaaagtttgatccatacattaacgtagacccagggactatgagcccataccaacacggtgaggtattcgtaacagatgatggcgcagaaactgacttagaccttggtcactatgagcgtttcatcgacattaacttaaacaaatacagcaacgtaacaacaggtaaaatttactcttcagttcttcaaaaagagcgtcgcggtgaatatttaggaggaacagttcaagttattcctcatattactaacgaaattaaagaacgcgtatatcgttctggtcgtgaaacaaatgcggatgttgttattacagaaatcggtggaactgttggtgacatcgagtctctaccattcttagaagcaatccgtcaaattaagagcgacatcggtcgtgacaatgtaatgtacattcactgtacgttaatcccgtacttaaaagcagcgggtgaaatgaagacaaaaccaacacaacatagtgttaaagaacttcgtagcttaggtattcaaccaaacattatcgttgttcgtacagaaatgcctgtttctcaagatatgaaagacaagcttgcattattctgtgacatcgatacaaaagcagttatcgaagctcgcgatgcagatactttatatgcggttccattatctcttcaagaacaaaacatggaccaaatcgtttgtgaccacttaaaattagacaatccagctgcagatatgacagagtggattgcgctagttaacaaagtgcgtaatctttctaagaaaacaaaaatcgctcttgttggtaaatatgtagaacttcaagatgcttatatttctgttgtagaagcacttcgtcatgctggttactcattcgacacagatgtagaagtaaaatgggtaaatgctgagcacgtaacagcagaaaacgtaaaagaattagttggcgatacagatggtatccttgtaccaggtggcttcggcgatcgtggtgtagaaggtaaaatcgttgcgattcaatatgctcgtgaaaacaaagttccattcttaggaatttgcttaggtatgcaacttgcatcaatcgaattcgcacgtaatgtattaggtttagaaggtgctaactcttctgaaatcaaccctgacacaccatatgcaatcatcgacttattaccagaacaaaaagatgtagaggacctaggtggtacacttcgtcttggtctatacccatgtaagcttgctgaagaaacaaatgcttacaatgcttataatgagccggttgtatatgaacgtcatcgtcatcgttatgagttcaacaaccagttccgtccggatatggaaaaagaaggatttgtattctctggtacaagcccagacggccgtctagttgaaatcattgaattaaaagaccacccttggttcgtggcagcacagttccacccagaacttgtttctcgtccaaaccgtccacaaccattgttccatgacttcgtaagagcttctattacgaataaagagagcaagtaataaaaaaagcgcctgaaataaggcgctttttttaatattcatttaacatttcatcgattgtaaatttgattccgtgataagcaaataaagctactattaaacttgggaatccgtagcgattaccttcatcgtctggaataagaccttttaacagttttgtatcaatatgtacgtctgtatatcgttcgagtgattccgtaccttcttgaagagcagaaatgccgacaatagagtgtccctcttcttgtagtttttttgcaatttctacaaccgcttcatctgttgaaaaacggctaataagaagtacacgatccgcagaggttacttctgcttctttaccattttcaaataagcgttttgcttgcttcattggttcagcaccgaatagtgcctcggcaacaacgccttccatttcatttgtaccatgtaaataaatgaaaccatcgccaactagtgcttgagcaagtaaacgagcactatcttctatattcatttcttctttttgagaaactctggagaaataaccacttaattgagttgaaaaaatttttaacataatgttactcccttcgtacgtgtttgccggctttcattatagtttatttttttagaaaggtgaaatcgtagggtagcataacaaaataggaaacggtaaaataagaaagaataggaaggaatttgccaaagaatagcgaaaataaatcgttaagatataagaagctttaaatcttgtacttacacagaaaggttgggaattatggaaggtaaaattttaatcgttgatgatcaatatgggattcgtgtgctattacatgaagtgttccaaaaagaaggttatcagacattccaagcagcaaatggatttcaagctttagatatcgtgaaaaaagataatccagatttagtagtgttagatatgaaaattccaggcatggatggtatagagattttaaagcatgtaaaagaaattgatgagagtattaaagtaattttaatgactgcttatggagagcttgatatgatccaagaagcaaaagatttaggtgctttaatgcattttgctaaaccatttgatattgatgaaattcgtcaagctgtgagaaatgagctcgctgtagaggcgtaaaaatgaattttttataaaaaatatggaaaaaagcgtttacatggactattgtgcaggtgaatacggttgagtttttgagtacaagttgttatcctattgagtgtagaaaaaagtccggtatgtagatatacatattttaccttattctggtcatactaccagcgataagaacttatcggatacaaaaaacgttttttaggaggattcaccatgcctttagtttctatgaaagaaatgctaaacaaagcactagaaggaaaatacgcagttggtcaattcaacatgaacaacttagagtggactcaagctatcttagctgctgcggaagaagaaaaatctcctgtaatcctaggtgtatctgagggtgcagctcgtcatatgactggtttcaaaacagttgtagctatggttaaagctttaatcgaagaaatgaacatcactgttcctgtagcgattcaccttgatcatggttcaagcttcgaaaaatgtaaagaagcaatcgatgcaggtttcacatctgtaatgatcgacgcttctcaccacccattcgaagaaaacgttgaaactactaaacaagtagtagaatacgcacacgctcgtaacgtatctgttgaagctgagcttggaacagttggcggacaagaagacgacgtaatcgctgaaggcgtaatttacgctgacccagcagagtgtaagcaccttgttgaagcaacaggtatcgattgcctagctccagctttaggttctgtacacggtccttacaaaggtgagcctaacttaggattcgctgaaatggaacaagttcgtgacttcactggcgtacctttagtattacatggtggtactggtatcccaactgctgatatcgaaaaagctatctctttaggtacttcaaaaatcaacgtaaacactgagaaccaaatcgagtttacaaaagctgttcgtgaagtattaaacaaagaccaagaagtttacgatcctcgtaaatttatcggacctggccgcgacgctatcaaagcaactgttattggtaaaattcgcgaattcggttctaacggtaaagcgtaagaataaaattccgttttggaaaccgtctagtcttttagacggtttcctttcgttgtataatgaaagcgtgaacaagtctaaagattttatcatttttggtttttaaatagaaaataatgtgcatagtcctattaataaatgtgataacgtatctaaattgataaagtgaattcgatgaatagttgatctttatctattcgtgctacaggagaaatgaagataatggtttcctatttattgagttttgggatggaaagagtaattgagattcttaaggggagctttctataaaaagatagaaagtaaatacattcacaagaagggagctcaatatggaaaaattgctaattgaaggcggaagagctttaaatggaacaattcgagtaagtggtgcaaagaacagtgccgttgcattaattccagcgacaattttagcagatactccagtaactattggtggtgtccctaatatttcggacgtgaaaatgttaggagacttactagaggaaattggagggaaagtaacttatggacaggaggaagaaatggtagtcgatccttctaacatggttgcaatgcctttgccaaatggaaaagtgaaaaaattgcgcgcttcttattatttaatgggtgcaatgcttggccgttttaaaaaagctgttattgggcttccgggtggatgtcatttaggcccgaggccgattgatcagcatattaaagggtttgaagcgctaggtgcacatgttacgaatgaacaaggtgccatctatttaagagcagatgagctacgcggggcacgtatttatttagatgttgttagtgtaggagctacaattaatattatgctagcagctgtacgagcaaaaggtagaactgttattgaaaatgcagcgaaagagcctgagatcattgatgtagctacattgttaacaagcatgggagcccgtattaaaggtgctggtacagatgtaatccgaatagatggtgttgactctttacatggttgtcaccatactatcatcccagatcgtattgaagctggtacgtatatgattctaggagctgcatcaggaggagaagtaacggttgataacgttattcctcagcatttagaatcagttactgcaaagctaagagaagctggtgttcaagttgaaacgaacgatgatcaaattacggtgaacggtaatagaaagttaaaagtagttgatatcaaaacgcttgtatatccaggttttccaacggatttacaacagccgtttacgacgcttttaacaaaggcgcacgggacgggagttgtaacagatacaatttacggtgcccgtttcaaacacattgatgaattacgtcgtatgaatgctcaaattaaagtagagggtcgttcggcaattgtaactggtcctgtgttactgcaaggtgcaaaagtgaaggcgagtgatttacgagcgggagcggcacttgttattgcaggtttaatggcagatggaattacagaagtaacaggacttgagcatattgatcgaggttatgagaatatagtggacaagcttaaagggcttggagcaaacatttggcgagaacaaatgacaaagcaagaaattgaagaaatgaagaacgcataagtgatacttccgcaagggggaagcgaagcatcactacttgcggaagtacactttatagaaaaacacggttcacaaaatagggcagaaatataaagacttaaaggagagggattatcgtggaaagaagtttatctatggagttagtacgtgtaacagaggctgcagctttatcatcagcgcgttggatggggcgcgggaaaaaggacgaggcagacggtgcagcaacatcagctatgcgtgatgtatttgatacaattccgatgaaaggtacagttgtaattggtgaaggtgagatggatgaagcaccaatgctatatatcggagagaaattaggtacaggatatggaccacgtgtagacgttgcggttgatcctttagaagggacaaacatcgtagcagctggtggctggaatgctcttgctgttattgcaattgcagaccacggtaatttgttacatgcccctgacatgtacatggataaaatcgcggttggcccagaagcagtcggggcggtcgacattgatgcgcctattattgataacttacgtgcagttgcgaaagcaaaaaataaagatattgaagatgttgtagcgacagttttaaatcgtccacgtcatcaagaaattatcgaagaaattcgtaaagctggtgctcgcattaaattaattaatgatggagatgtagctggagcgattaatacagcgtttgatcgtacaggtgtagatattttatttggatctggtggagcacctgaaggtgtattagcagcagttgctttaaaatgtttaggtggagaaattcacggaaaactattgccacaaaacgaagctgaattagcacgttgtaaaaaaatgggcatagaagacattaatcgtatccttcgtatggaggacttagtaaaaggtgacgatgcaatctttgcagcaacaggcgtaacagatggagaactattacgcggtgttcaatttaaaggtagcgtaggaacaacgcaatcccttgttatgcgcgcaaaatcaggcacagttcgcttcgtggatggacgtcatagcttgaataaaaaaccaaacttggttattaaataaaaagcgtaagcagctcgttcagaaaggttaaaatggtcgacttttctaactatcggagctggaactaaattaaataagaagcgaagacaaattttcttgtcttcgcttcttgtatttgtgttccaacgtattgattaaaactagataaaagggttacaatagtgaatattaccctacttgaacttattgcctttcattattaattatttgccttccgtattttttccctttacccatgaaaaaagagaataacgttaaagtgtggtgtctgaatgaatttgtcaattgcagcattagaaaacatgaaattaaaagagttatacgagcttgcgaaagaatttaagatttcgtattatagcaaattaacgaaaaaagagttaattttttctattttgaaagctcgagcagaaaaagaaggtttctttttcatggaaggcgtattagaaattattcaatcagaaggatttggattcctacgtcctatcaactattctccaagctcagaagatatttatatctcagcttcgcaaattcgtcgtttcgatttacgtaatggagataaggtttctggtaaagtacgacctccgaaagaaaatgaacgctattttgggttattacaagttgaagctgtaaacggagatgatccagattcagcaaaagagcgtgtgcatttccctgcattaacaccattatacccagatcgccaaatgaaattggaaacggaacctaaaaagttaccgacacgcatcatggatttaatcgcaccagttggatttggacaacgtggtttaattgttgcgcctccaaaggctggtaaaacaagtctattaaaagaaatcgcgcatagtgttacaacaaatcatccggaagcagaattaattgtacttttaattgatgagcgtccagaggaagtaacagacattgaacgttctgttaaaggagatgttgtaagttctacttttgatgaagtgccagaaaatcatattaaagtagctgagcttgtgttagaacgtgcgatgcgtcttgtagagcacaagaaagatgttatcattttaatggatagtattacccgtttagctcgagcttacaacctcgttattccaccaagtggtagaacattatcaggtggtatcgatccagctgccttccatagaccgaagcgtttctttggagctgcgcgtaatattgaagaaggcggtagcttaacaattttagcgacagcccttgttgatacaggatcacgtatggacgatgttatttacgaggaatttaaaggaactggaaatatggaacttcacttagatcgttcattagctgaacgtcgtatcttcccggcgatcgatattcgtcgttctggtacacgtaaagaagatctattaattccaaaagaacatttagacaagttatggggcattcgtaaaacaatgcgtgatacaccagacttcgttgaaagtttcttacgtaagcttcgtcaaacgaagacaaatgaagagtttttacaaaacattgttgcagactcaaaaaggtatgtaacaactaagtaaagggaaaaaatcaggactcgcttattttatagtaagcgagttttttatgctgtttaggtgatattaaagagagaaataagtgagagaaccttagccagtcagagctaaacgagccgtctccactttaagataatatcgagctccagcggctaaaatctccggtcattttgctctctcgcatgaagcaaaaagcgcttcagggtcgagagctccaatgccctgcgattttgaacgagccgtctccactttaagataatatccagttccggtggctagctcttcgcatctaagaaccttccgcccaaaaggtaaaaagcacctttaggtcgaaagaaccttagctggtcagagctgagcgagccacctccactttaaatttaatatccagctccagcggctagaatggttggtggcttcgcgtcttcctacgaggcaaaaagcgcctctacgtcagaagctccatccccctcccattctgaacgagccgcttgcgcttttaaaattaaaaagacaaaaacaggtagttgcaaaatgaagttagccttgttataatttcatcatatgtgtttcatcaatatagttgtgtatgcagctgaagatgaaaaactctgtttcgaaaatgattcagggcggaaggagatgaaaagaatgaaagcaggaattcacccagattacaagaaagttgtattcatggacacaaacacaggcttcaaattcttaagcggatctactaaaggatctaacgaaactgttgagtgggaagatggtaacacttatccattactaaaagttgagatcagttctgattctcacccattctacactggacgtcagaagtttgctactgcagacggacgcgttgaccgcttcaataagaaatacggtcttaagtaataaaaacataaaacaggcaagtgtatgtattcgcttgtctgttttttttgcgaaaatattatacctttaccctacttttaactgaaaagtagatgaaaggagagcttcatgtacttaataaatcaaaatggctggattgaagtgatttgcggtagtatgttttctggcaagtcagaagagctaatccgccgtgtgcgccgtacgcaatttgcaaaacaacatgcaattgtatttaaaccatgtattgataatcgatatagtgaagaagatgtagtatcacataacggattaaaggtaaaagcagttcctgtttcagcttcaaaggatatatttgaacatattacagaagagctggatgttattgcaatcgatgaggtgcaattttttgatggggacattgtggaagtggtgcaagtattggcaaatcgtggctatcgtgtcattgtagctggtttagaccaagatttccgtggtctaccatttggacaagttcctcagctgatggcgattgctgaacatgtgacaaaactacaagcagtatgttctgtatgtggatctccagcaagtcgtacacaacgattaattgatggagaaccagcggcatttgatgatccaattattttagttggagcttcagaaacgtatgaaccgcgttgtcgtcattgtcatgcagtacctgcaaacaaagataagtaaaactcgctgcgcaaggcgggtttttttcaaaatagagagaatgagcggtgtgagccgcttacgcttttaaatatatctagttctggtggctagctcttcgcatctaagaaccttccgcccaaaaggtaaaaagcacctttaggtcgaaagaaccttagctggtcagagctgaaagagccaccgccacttttaaatataatttgcgtttttttgagtaagtaccatatactatttgtattagatactaggatgtagaggtgaatgatgtgttagatcgtttgcaagctgtagaaaatcgttatgagaagttaaatgaattgttaagtgatccagcgattattagtgattcaaataagcttcgtgaatattcaaaggaacagtctgatatacaggaaacggtagaggtgtatcgtgagtataaggatgttcgtgagcaattaaaagatgcgaaagcaatgttagaagataagttagacgcagaaatgcgtgaaatggtaaaagaagaagtttctgagttagaatcacaagataaaacattatcagagcgtctgaaaattttacttgttccaaaagaccctaatgatgataagaacgttatcgttgaggttcgtggagctgctggtggagatgaggcagctttatttgctggtgacttataccgtatgtatagccgttacgctgaggtacagggctggaaaacggagattattgaggctagctatacagagttaggtggatataaagagattatctttatgattaatggtaaaggtgctttcgcgaagctgaaattcgagaatggtgctcaccgtgtacaacgtgttcctgaaacggaatctggtggacgtattcatacatctacagcaacagtagctgtattaccagaggcagaagaagtagaaattgatattcatgagaaagatgttcgtgttgatacattcgcttctagtggacctggtggacagagcgttaatacaacgatgtcagcggtgcgtttaacgcatttaccgactggtgtagttgtatcttgtcaggatgagaaatcacagatcaagaataaagaaaaagcgatgaaagtattacgcgcacgtgtttatgataagtttagacaagaagcgcaagctgagtatgatcaaaaccgtaaacaagctgttggtacgggagatcgttcagagcgtattcgtacgtataacttcccgcaaaaccgtgttacagaccatcgaatcggtttaacgattcaaaagctagatcaaatcttacaaggtaagttagatgatttcatcaatgccttagtgatggaagatcaggctcaaaagatggaggcagctgagtaatgcgtgtctatgaagccctgaaatgggcttcttcttttttacaggaaaatggacgagatgaaaatgcgggagaaattgtcctttgtcatgtattaaaggtgaacagaacaggattacttatgaatatgcgtgaagaaataactgaggatcaagagaaaagctttacggagtttatccacaagcatgtagaaggtattcctattcaatatatgattggttatgaaatgttttatggacggtctttctttgtgaatgaagaagtattaataccaagaccggaaacagaagagcttatagtgggagtattagaaagaatcgagcgccattttggtgatgagaaactacatgtagcagatataggtacaggtagtggagcgatttctattacgcttgctttagaaaatgaaaatcttcatgtgtatacagtagatattgcacaagagtcgattgaagttgcaaaagaaaatgcaaaagctttaggtgcagaagtaacgttctatcacggtgatttattgtcaccatttcataaaacgggtcaaaagctagatgttgttgtttcaaatcctccatatataccggaagaggattggcgtggtctttctcctgttgtgaaagagcatgagccgaagagagcacttgttggtggtgaagacggattagatttctatcgccgttttatggaagaattgccgaatgtgttgcagaagaaagcgattgtggcgtttgaaattggagtaggacaaggtgaggatgtaaaaagattgttacaacaagcttttccacatgctcatgttgaggttgttttcgatattaacggaaaagatcgtatggtatttgcagagatggagtaaggttcacaccttactctatttttttgtggaaaaattcatatagattttgaatttaatagtttagaaagatgaaagtctgtccacactgtttgtagaagggacggtggaggaaatgaaaaaacaagttattgcttatcttcttatactattaattggtgcacagttacttgtgcagtttggatatatgaaagctgatgcgaaagggccttcagttattccgaaagaggccgttcgattacgaattttagcaaatagtgattcagataaagaccaggcattaaagcgtaaagtgcgtgatgaagtaaaagcacaaattgatgggtgggtagcggatttaacttcatttgaagaggcacgcaaagtaattcaaagtcatattccagaaatcgagaaaacggtggaaaatacgttaaaaagagaaggaagtaaagattcatttcaagtgaaatttagtaagaatgtaaagtttcctacaaaggtatacgggaattttatttatccagcaggagaatatgaagcagtattaatcacaattggagaaggtgaaggggcgaactggtggtgtgtattatttccaccaatgtgtttcttagatttttcgagcgggacagctgtaagaaaagaagagcacgttgtgaaggcggaatctcctgaagaggagcaggtgaaacaactagatgaggaagtaatagataaagaagagaagaaagtagataaggtaaaagaaacgaaagctgtaaagcaggaagtagtaaaaaaagtaacagcttctgaaaagaaagtagtaaaaaatgaaacaaaagtcgaagagcagcctgtaagtaaagaagaaataaaaactgtgggaaaagtggagaaacctgtggagaaaaaacaagaaaagcaaaatgagtatgtaaaagtagaagaggaagaagaaaagccagaagttaaattgtttattgtagaagcttttacatctttattctctaaatagtactattaataaatccctcttcatatataaaaatgaggagggatttattatgaagaaagtgtattttgctacgaaagcagatgtggaaagattacattcttttttcggacaagctaataaaaaagatgataaaataaatgagttgtacgcacaatttatgattttggaagaggcggaagaaatacgagctgtaattggttatgaacgaagtggggaagatgtgcttattcgttcttgtttattcacacctcatgtggataaacagactttcttatatttttttgaaatgtttttgcagtatatgaaagaaaaaagtgttcaacaattgtacttactaacaaatcatccacaatctgtaccgatctttcagttttttgacttttttactatagaaaaggatgaggttccagagggaattcaacaactagaacatttttgtaaaaatataaaagagcagaatgcaataatactaaattgtcagctattcacaaagttatccacggattaattaggtttatccacattttgtggataaaccttgtttgtcttttggataaatctcatagtaaactaaaaatatacaagtatttaagggtagaaaaggacgtggaaaaaaatgcatacaaacatgtgggttgtggataatgttgtggaaagaaaaaaatattatccacagttacaagaagcagcaaaattattaagagaaaatgaggcggttgctttccctacggaaacagtatatgggttaggtgcaaatgcgatggatgatgaagcaatcgcgaaaattttcgaagcgaaaggaagaccgagtgataatccactcattgtccatataggtacaaaatctcagttagatgggattgtgaaagaaattccaccagttgcagagaagttaatggcgcatttttggccaggaccattaacaattattttgccgagaaaagaagggatttcagagaaggtgacggcaggacttaatacggttggagtaagaatgcctgatcatccaattgcacttgctcttattgaagaggcgaatgtacctgttgcggcaccaagtgcgaatcgttcagggcgtccaagtccaacattagcttctcacgtatatgaagatttgaatgggaagattgcaggtattgttgatggtggtgcaactggagtaggcgttgaatcaactgtaattgattgtacaagcgcggttccaacaatattacgtccaggtgggattacgaaagaacaattagaagcggtgataggtactgtttctttagatccagctttaaaggatgagaaggaaaaaccgaaatcgcctggaatgaaatacacacattatgccccgaaagcaccacttagtattgttgagggctcacgtgagtttattcagcatcttgtggatgagaaaaaggaagaaggatttaaagtaggcgtattaacgacagaagagtatcagcatgtatatagtgcagatgttatattatcttgtggtgttagaagtgacttagctagtgttgcgactaaattatatgatgtacttagaacatttgatgcaagtgaagtggatgttatttttagtgagtcattccctaatgaaggaatagggaatgcaattatgaatcgtttaacaaaagcggcaggacatcatattattattgaatgataaggtaagattagcaaacagaatatttctccttggataagcatattgtgaagtagcacgtccaaggaggggcatgaatgacgtttgaacagctaatacctttaataattatggcattcgccttagggatggatgcgttctcggtgagtcttggtatggggatgatacccctaaagttaagacaaatcctgtatattggtatgacgatagggatatttcatattattatgccgtttataggaatggtactaggtcgttttttatcagagaagtatggagatatcgcacattttgcgggtgctattttattaatcggactagggttttatatcgtatattcgagcattttacaaaatgaagagactagaacagcccctattggaattagtttattcgtatttgcatttggcgtcagtatagatagtttctcagtaggacttagtcttggtatttatggggcacaaacaattattacgattttactttttggatttgttagcatgttattagcgtggatgggtttattaattgggagacatgcgaaagatatgctcggtacatatggtgagatagtaggtggtatcattttggttgggtttggattatatatcctttttcctatataattttatgtaggagggaattatgaacaagctattggaatggtatgttaaatttttgaccttctatcctcgatggctaagaagacttataatttggggtattattttgcaaatttcgatgttaggttggattaagttaattcgtgaatggtgagatagttcctttctgtgaatattttgtttgtactatatttattgcgctaaaaattacagatatagaaaggatgagatgaatgacgagattgaagcaagtttttggtattattattagtttttttgttttttggtttagtatgctcggtgtacaaatgtttgctgagtttttagatattgagtcattgaaatttgttgcgggaaagactgaggcggcgcgtgccttttactctccgtacccgtttttaattgtttttcttattacattgctttccctatacttcttcgtaattaagctagggaagccgaaaaaagagaaaatgcctactttagaggaaaagaaggaagaattacaatgagaaaatcccctgctaaaaagcaggggattttatatttgagtgatgggaggaatctagccgccttgcttttaaatatatccagctccagcggcaagctcttcgcatgaagcaaaaagcgcttcaaggtcgagagcttgaagtgtcctgcgattctgaacgagccgcttccgcttttagatattatccagttccagtggccagctcttcgcatctaagaacctcccgcacgaaaggtaaaaagcaccttttgtgcgagagaaccttagctggtcagagctaaacgggccacttccacttttaaatattatccagcttcagcggctagaatctccggtcatttcgctctctcgcatgaagcaaaaagcgcttcaaggtcgagagcttgaagtgccctgcgattctgagcgagccgcttccgcttttagattggcctaaccaattcaaattgttctcctaattttgcatagttgtgtcctgctaggcggcttattggtttgagtccttcggcgtgaatgcgccctttttcatatagatgttcggcaacgtggaaacgaacgacgcgtccaattagtagatcacaagctggtgagtcttccgttccgccaagtggaattgcacgttctaatacgcattccattcgaatatttgcttcttttacacctggaacagagatgacttcactttcgattggtgttaattttgctagttcaatttcactttcatttggcgggaggttagctgctgtttcgttaattgctgctacatatgattcgtcagaaatatgtacgacaaattctcctttttcaattgcgtttcgggaagtgtcctttctttctccggcttttcgttgtacagatactgagataagtggtggattagcagcgacaatattgaaataactatatggtgctccgtttagtacgccttcttttgttacagaagtaacgaatgcgacaggacgagggatgatacttccagtaagtaatttgtaattatctttttcagtttgttcatttggattaatggataacatgcttgtaatcccctttctaaatatgaatacttattgtttgtttacaagataacgatgagaaaatcctgctggaaataatattttgtttcataaaaagaacttacttcaattgtaatgaagtaagttcttttttcaagaatctcaaatttgagataaaaattaaagtaaaacgtatgcgccaggtccgattaaagctacaccaacagcgacagcgattaacattaagttatattcatatccgttttgtgttacccagtaaccattttttccgtgaacagtgaagatagccattaacattgttccaacgataaataatgaaccaactacaatgaaaatacctgatgcaaataagaaaccacctagtaattcagttgcgccagccataaatgccataaatacaccaggacgtaaaccgattgactccatccagccacctgttccttttaaaccgtaaccgccgaaccaaccaaataatttttgagcgccatgacccatgaatgtaattcctataataagacgaataataagtagaccgaaatccatcatttttaaaaacctcctaaaagttattaacttaccttacgtaagtaataataaaatagttacttactttagtcaagtgaatttcgaaaaaagtttgaattaaattttacaaattaacaacaaaaaataaaatgtagtaaagacctctagacaagttgggcaaaaaaagagaaaatataaatagaagttaacttctaattgttattcagacaatcagaattgactggaattttgtgaagcgctacaataagagtctattagtaatgacgtaatttatttcgaaagcgtttttacagtataatattcgaagtatgaagtcttacatgtatcccgagctttactagggattgccctataaacttttaggtaaattataaggaggactatcctatgtttaaaaaattattcggtcttggttcaaaaacaaatgaagaaacaatcgtagctccattaactggagcagtgaaaaatattgaagaagtaccagatccagtatttgctggtcgtatgatgggtgacggtgttgcaatcgatcctactgaaggtgtagttgtatctccagttgatggtgaaatcgtacaattattccacacaaaacatgctatcggaattaaagcgaaaaacggtacagaaattttaatccacgttggattagaaactgtaaaaatggaaggcgaaggtttcgaagctcacgtttctgaaggccaagctgtaaaagctggagataaattaatctcattcgacttagaattaatccgtgaaaaagcgaaaagcacaattactccaattgttattacaaacacagatgcagctgagtctattaagacaactgtaggcgtagcagctacaaaaggttcaacagaagtaatgaaagttacaatgaaataattgcaatataagaggaatccgtttcgtatgaaatggattccttatttttgttgcatgttcagcatgtatgttaaaatactctaggcacttggaaatagggtttcacatatatgtggataaggctcatttttcttagaaaaaatataagagaaatgcgccttttgtatattcacatttcttttgttctattctaatgtaagttatgatgaatggtaagaaatcgaatataggggtgggtttgaatgaaacgagtgttatttgtttgtactggcaatacatgtcgtagtccaatggctgaggcgttgcttcgtcatcacggaggagataagtttgaagtgcaatctgctggtgttttcgcctatcctgggagcgatgcatcggtacatgcgaaggaagctttagctgaaaaaggaattttaattgatcatgcggcgcagcaagtaaatgaaactttgcttgattgggctgatattgttgtaacgatgacagaaaaccataaacaaattgtacttgggcattatccgagcgttgaaaagaaattaaatacgttatatggattaactgaaggtataggcaaggacatttcagatccatttggaggctcgctttctatttataaagaaacgttagatgagatggaaaaacttgtacaaactttactgaaaaaacattcagtaggttgatgtttcgtgtataatacgatattggagatcacttcttcctatatgaggtagcgagtgtgaaatgaagataattgattgaaactttggaggggtaaaaatgaaagtagtaatagcatctgatcacggcggtatgaatatccgcaaagaacttgtaagtttattagaagagttaaatattgaatatgttgatttaggttgtgaatgtgaagctggttctgttgattaccctgactttgcgtttccagcagctgaaatggtagcgaatggtgaagtagatcgtggtattttagtttgtgggacaggcattggtatgtcaatcgcagcaaacaaagtaaatggtatccgttgtgcgttagttcatgatactttcagcgcgaaagcaacgagagagcataatgacactaacatgctagcgatgggcgagcgtgtaattggtgctggtctagcgcgtgatatcgcgaaaatctggttaacaactgactatgaaggtggtcgtcacgaaaaccgcgtaggaaaaattaaaacatacgaaacaaagtaatagattctaactatcagtagtgtgaaatataatttggtgaaccaacctgtgaaaggaagaggcgtaatgacagaaatcgtaaaggtaagagaacagctacaaatgtcgctttctgatttccaagaacaagcttcattacaaagcggtcaaatttttgtagtgggttgtagcacgagcgaagtgctaggcgaaagaattggaacatcaggaacgatggaagtagcagaggcgattttctctgagttaaaacaatttcaagagcgaacaggtattgaattagcgtttcaatgttgtgagcatttaaaccgtgctttagtagttgagagagaagtagcgataaaatatcaatttgaaattgtaacagttacgcctgttagatcagcaggtggtgcattggggacatacgcgtatcacaatttgaaagatccggtagtagttgagtttattaaagctgatgcaggaatggatattggtgatacatttatcggtatgcatttaaagcatgtagctgttccggttcgtacaagtgtgaaggcaattggaagtgcgcatgtaacgatggccaaaacacgtggaaaactaattggtggagcgcgtgctgtctatgcggcagtggaagagactaccacttgccgttaaatatgagaaattaggaagtcatatagtaactgtttatcataagataaaaggtatgttgtctgactttataatagaagaaagaaaagaccgattttcggtcttttttttcttttatgatatagaaagtcatgttagaatgtagttgaaaacatgaaggttcgaaagaattacaacctgaattttcgttttttctgaataaataagaaaaaactgttgggaatcgatgtaattcgttcagaaaagggggattttggtggatcatttaaaacgtcaagatgaaaaggtatttgctgcaattgaggcagaactaggaagacagcgttcaaagattgagttaattgcttcggaaaacttcgtaagtgaagcagtaatggaggcacaaggttctgttttaacgaataagtatgctgaaggatatcctggaaaacgttactatggtggctgtgaacacgtagacgtagtagaagatatcgcacgtgatcgcgtgaaagaaattttcggcgcagagcacgtaaatgttcaaccacactctggtgcacaagcgaacatggcagtatactttacgattttagagcaaggcgatacagtacttggtatgaacttatctcatggtggtcacttaacacacggaagccctgttaacttcagtggagtacaatataatttcgtagaatatggcgtggatgctgactctcaccgtattaattacgatgatgtattagcaaaagcgaaagaacataaaccaaaattaatcgttgcaggtgcaagtgcataccctcgtgttatcgatttcaagcgattccgtgagattgcagatgaagtgggcgcttatttaatggttgatatggcacatatcgctggtttagtagctgctggtttacacccaaatccagtaccacatgcacatttcgttacaacgacaacacataaaacgttacgtggtccgcgtggtggtatgattttatgtgaagagcaatttgcaaaacaaattgataaatcaatcttccctggtattcaaggtggtccacttatgcacgtaatcgctgcaaaagctgttgcatttggtgaagcacttcaagatgatttcaaaacatatgcacaaaatatcattaacaatgcgaaccgcttagctgaaggtcttcaaaaagaaggacttacacttgtttctggcggaacagacaatcacttaatcttgattgatgttcgtaacttagaaatcacaggtaaagtagcagagcacgtattagatgaagttggtattacagtgaacaaaaatacaattccatttgaaacagcaagcccatttgtaacaagtggtgtacgtatcggtacagcagctgtaacatctcgtggtttcggtttagaagaaatggatgaaattgcgtcacttattgcttatacattaaaaaatcatgaaaatgaagctgcattagaagaagtacgtaagcgtgtagaagcgttaactagcaaattcacaatgtatccaaatctataatagattgaagaagactgccgagacttaattgttttggcggtcttttttgtggacatatattatttttaaagtatgtatacaaatgatgaataaattttggcgatataatgaaggatacagctcccataattggtaaagatactagatagattcatcgtaaaatcatgattttgccaaatttgcccttgaatattagtagcgttttctttacaatcgtaaatagtgtaaaaaagcgtgcaaacgcatgaatatcatctaaaggagagattcacatgggaaaactgtatgtatttgatcacccgttaattcaacataagattacatatattcgcgataagaatacaggtacgaaagattttcgtgaattagtggacgaagtagcaagtttaatggctttcgaaattactcgcgaccttccacttaaggacattgaaattgaaacacctgtaagcaaagcgacaacaaaagtgatcgctggtaaaaaacttggtttaattccgattttacgtgcaggtttaggaatggttgatggaattctgaaattaattccagcagcaaaagtaggacacgttggtttataccgtgaccctaaaacattgcaaccggtagaatactatgtgaaacttccaacggatgtagaagagcgtgactttatcgtactagatccgatgctagcaacaggtggttctgcggctgaagcaattaactctctgaaaaagcgcggtgcgaaacaaattaaattaatgtgtatcgttgcagctccagaaggggtaaaagtagtacaagaagaacatcctgatgttgatatttatgtagcagcattagatgagaaattaaatgaccacggatatgtagtaccaggtcttggtgatgctggtgaccgtttattcggaacgaagtaagacaactgacgagcaggggagatttcccagctcgtcttttttgttgtaagcaagtaggggagggggagaggataaatatacatcgtatatacaacataagttgcatacacctcacatataatatagaagtcttacgtctgaggaacactatattatggaagaaaagcgttatatctcgaaaatataatagtgacaaacttgtgaacatttccttctattataaagagaaaactgttagaaattgcatatatgtaaccagtatttagaaggggaacgttttcatttttgggaggaaatgcctaatactcaaatttttagattttttacgatttctcgttgacactgttaataccctattgtatgctaacaacggggatagatggtagggctttcagtgacaaaattacatctattccgtgacgaaaatgtaaactttttgttttgtataggatttatgcaaaaaaatgagttattattaacacatcgtgaatgagggttacatattggagggatgaatctttgcaaaaaaacgatcgcagccatataaaagcttatgctttaatgtcaggtattcttgctcaattagtcggttctattcttgttggaatctttggtgggcagtggattgataataaggttggaacgtttccgttgtttcttattatagggttattactcggactaggaacaggggtatacgcaatgattcgactcattcgacattactattcgggagagcaatgatgatagacgtacatggacttgtccaaagacaaaagaaatatatgtactacttgcttgcgcttctagtgctaggatggggatttacctcttacaaggatgtatttcttggactgattatcgggacgattttcagttttcttagtttgcgcatcattgcacgtagaacagacaagctgctagatcgcgtaacaaatggagaaaacgtgaagttcaaggcaacagcggtaagtacatattcaagattcgccacgattgggttattaattttatttgcagccaaatatcaagagttaatcgcgatgtggggcctaggtgtaggattgctgacaggataccttgtcatgatcatagattttctttatttagagtataagagcagggaagagaggtgaattactagtggaacacggtaaattagttgaatttctaggtttaacgttcgatttgtcatcagttatgatggttactgtagcagcagttattgttttcttaatcgctgttatcggaactcgcagcttagctcttcgcccaaccgggatgcaaaacttcatggaatgggtgtttgacttcgtgaaagggattatcaatagtacgatggactggaaaacaggtggacgtttcttaacgcttggcgttacgcttatcatgtttatcatcgtatcgaacttccttggtttaccattcatgtattcagcaactgaagctggcgaacatattgcatggtggagatcaccaacgtctgatccagcagttacattaacattagccgtgatggtagttaccctcacccattattatggaattaagatgaagggtacgaaagagtacgtaaaaggttatttccaacctatgaaattcttattcccattaaaggttattgaggagtttgctaacacattaacgttaggtcttcgtttatttggtaacatttatgcaggtgagatcttattaggattacttgctaagttgggcggagcatcagtccttggggcattaggtgcgcttgtaccaatgttagcatggatgggattcagtgtattcgttggttcaatccaggcatttattttcgttatgttaacgatggtttatatggctcataaagtaagccatgaccattaatataatttaagtaagaaaaaatttatttttttataatacaaaggaggacaaattaaatgagtttaggtgtaatcgcagctgcaattgcaattggtttatcagcattaggtgcaggtattggtaacggtcttatcgtatcacgtacaatcgaaggtgttgctcgtcaaccagaattaaaaggcgcacttcaaacaattatgttcatcggggttgctttagttgaggcacttccaatcatcggtgtagttattgcattcatcgtaatgaacaaataagggagactccccttacatagatggcgaagagtgtttttccgaactttcttcgccattgctttatgaatgaaacgtatgtctttttttttcatatgatcaatttagatattttgaagggagtgaatccttgtgccaactttattattaggtgctgccattccatttggaacgattgcttatacattgttcattttcttacttctattagtaatgctacgcaaatttgcgtggggtcctttaatgggaattatgaaagaacgtgaagagcatgttactaatgaaatcgacgctgcagaaagaagtaatgctgaggcgaagaagttagtagaagaacaacgtgaaatgttaaaacaatcacgtgttgaagcacaagagttaatcgaaagagcgaaaaagcaagctgtagatcaaaaagatgttattgttgctgctgcgaaagaagaagcagaatcaattaaagcatctgctgtacaagaaattcaacgcgaaaaagagcaagcaattgctgctttacaagaacaagttgcttctttatctgttcaaattgcttctaaagtaattgaaaaagaattaaaagaagaagatcaagtgaagttaattcgcgattatattaaagaagtaggagaagcgcgatgagcaatgggattgtagcaaaacgttatgctgtcgctctttttaaaattgctaaagaaaaacacgtattagaaatgtttgaagaggaattacgccttgtacaaaacgtttatgtaaagaacggagaactacatagctttttaacgcaaccgaacatttcaaaggaacaaaagaaaacgtttcttgcaaacgtattcggatctgtttctgaatctattttaaatacgttatatattttaattgataacaaacgcattgatatcttacctgaaattgcagatgaatatgttgttcttgctaatgaagaacgtaacgtagcggatgcaactgtatattctactcgtcttctatcagaagaagagaagcttaacattgctgaagcatttgcaaagagaacgggaaaagatgcaattcgcgtgaaaaatgttgtagatgaagatttactaggcggaattaaagtacgtattggaaatcgcatttatgacggaagtttacaaggaaaattagcacgtattcagcgtgaattaatgaagaatagataggggtgaagcacatgagcatcagagctgaagaaattagcgcactgataaagcaacaaatcgagaactatcagtctgaaatcgaagttagtgatgttggtacagttatccaagttggtgacggtatcgcgcgtgctcatggtcttgataacgtaatggctggtgaacttgtagagttctctaacggcgttatgggactagcacaaaacttagaggaaaacaacgtaggtattatcattttaggaccttacacagaaattcgtgaaggtgacgaagttcgtcgtactggtcgcatcatgcaagtaccggtaggaaaagaactaattggtcgtgttgtaaacccattaggtcaaccagttgatggtttaggcccaatcaatacaacaaacactcgtccaatcgaaagtccagcaccaggtgtaatggatcgtaaatctgttcatgagccacttcaaacaggtattaaagcgatcgatgctcttgtaccaattggccgtggtcaacgtgagttaatcatcggtgaccgtcaaactggtaaaacagcggttgcacttgatacaatcattaaccaaaaagatgaagatatgatttgtatctatgtagcaattggacaaaaagaatcaactgtacgtaacgtagtagaaacactacgtaagcacggtgcattagagtacacaatcgttgtaactgcatctgcttctcaaccagctccattattatacctagctccttacgctggtgtaacaatgggtgaagagttcatgtacaatggtaaacacgtattagtagtatatgatgacttatcaaaacaagcagcggcttaccgtgagctgtcattactattacgtcgtcctccaggtcgtgaagcttacccaggggatgtattctacttacattctcgcttattagagcgtgcagcaaaattaagtgatgcaaaaggcggcggttctttaactgcactacctttcatcgaaacacaagcaggggacgtatcagcatacatcccaacaaacgtaatttctattacggatggacaaatcttcttacaatctgacctattcttctctggcgtacgtccagcgatcgatgcgggtacttctgtatctcgtgtaggtggatctgctcagattaaagcaatgagtaaagtatcaggtacacttcgtcttgaccttgcatcttaccgtgagttagaagcgttcgctcagttcggttctgaccttgataaagcaactcaagcgaaattaaaccgtggtgctcgtactgttgaggtattaaaacaaggattacacaaaccattacgtgtagagaaacaagttatcattctttacgctttaacacgtggattcctagatgatatcccagtagtagatatcactcgttttgaagaagaattccatgcttggttagattctaatgcgactgacttattagaagaaatccgcacaactaagaaacttgcggatgacgacaaatttgcagcagcaatcaatggatttaaaaaagtatttgtagcttctgaataataaaagcggaagcggctcgttctgaatgtgagggggatggagcttctgacgaagaggcggtgtttgcctcgtaggaagaagtgaagccaccgagcattcaagccgctggagctagatagtatatataaaaggcatctcgggctctgagattgctaaaggtcatgtaaaggaaaagagtaggtgcacctattcttttccttcaatcatgagcaagaatatcttgcaacgtagattaggaagaggattcttactaatcgtgccaacttccggaaaaaaggtggtgaaaacctgtggcatctttacgcgatataaaagcgaagattaactcgacaaagaaaacgagtcaaattacgaaagcgatggagatggtatctgcatctaagttaaaccgtgcagagcaaaatgctaaatctttcgttccgtatatggaaaagattcaagaagtagtagcgagcattgcgcaaggaagcaaagggattaatcatccaatgctaaatgcgcgtcctgtaaagcgtacaggatacatcgttattacgtctgatcgcggactagcaggtggttataacagtaacgtattacgtacagtaagtaacgtaattcgtgaacgtcataatatggattcaaaccaatattctattattgtgcttggacgactaggacgtgattatttaaaacgtcgcggctttaacattattgatgaagtagttggattatctgaccacccatcatttactgatattaaagaccttgcttctcgagcaattgcgatgttcgcagatggtgcttatgatgagctgtacatctactacaaccattacgtaagtaaaatttcacaagaggtaacggaaaataaaattttaccgcttactgatgtggcgtctgacaaaccgacgacagcttatgaattcgaaccttctgaagaagaaattttaaaagtactattgccacaatacgcagaaagcttagtgtacggtgcattactagacggtaaagcaagtgaacacgcagcgcgtatgacagcaatgaagagtgctacagacaacgcaatggaagttatcgattcacttacactttcattcaaccgtgcgcgtcaggcagcgattacgcaagaaattacggaaatcgttggtggagcagcagcgttagaatagtattaaaaggcggaagcggttcgttcagaatgagagggggatggagcttttgacgtagaggcgatttgtgcctcgtaggaaaaagcgaagccaccgaacattctaaccgctggagctagattcaataaaaagcggaagcggctctgtcaaaagagtcgcgtaagctataaaccaataaaaaattaaaagctagctgctcgtagaaagttggctaattaaaagaaagctaggagggaacccgatgaataaagggcgcgttacgcaaatcatgggtccggttgtagacgttaagtttgatggcggaaagctaccagaaatctacaacgcccttacggtaaaacaaagcaacgaaaacggaagtattaacttaacatttgaagttgcacttcatttaggtgatgatacagttcgtacagttgcgatgtcttccacagatggacttgttcgtggcacagaagtagaagatactggtaaaccaatctctgtaccagttggtgatgtaacacttggtcgcgtatttaacgtattaggtgatgcaattgacttagatggtgaggttcctgcagatgtacatcgtgatccaattcaccgtcaagcacctgcattcgaagaattatctactaaagtagaaattcttgaaactggtattaaagtagtagacttacttgctccttacattaagggtggtaagatcggcctattcggtggtgccggcgtaggtaaaacagtattaattcaggaattaattaacaacatcgcacaagagcacggtggtatctctgtattcgctggtgtaggtgagcgtactcgtgagggtaatgacttataccacgaaatgagcgattctggcgtaatcaagaaaactgcgatggtattcggacaaatgaacgagccacctggagcacgtcaacgtgttgcattaacaggtttaacaatggctgagcatttccgtgatgagcaaggacaagacgtacttctgttcatcgataacatcttccgtttcacgcaagcgggttctgaagtatctgcccttcttggtcgtatgccatctgcggtaggttaccaaccaacacttgcaacagaaatgggtcaattacaagagcgtattacatctacaaataaagggtctatcacgtctatccaagcggtatatgtaccagccgatgactatactgacccagcaccagctacaacgttcgctcacttagatgcaacaacaaacttagagcgtcgtttaacgcaaatgggtatttacccagccgtagatccattagcatctacatctcgtgcactttctccagaaatcgtaggagaagaacattatgaagtagctcgtcaagtacagcaaactttacaacgttataaagagcttcaagatatcatcgctatcttaggtatggatgagttatctgaagaagataagttagttgtacatcgtgctcgtcgtattcaattcttcttatctcaaaacttccacgtagctgagcagtttacaggtcaaaaaggttcttacgtacctgtaaagaatacagttagtggtttcaaagaaattctagaaggaaaatatgatgaccttccagaagatgcattccgcttagtaggtggcattgaagaagttattgaaaacgcgaagaaaatgatggcgtaaggccttaggagggacgaagtatgaagacatttccagtcagtattgtaactcctgatggaccggtttacgaaaaagaagtagaaatggtaagtgtaaaagcagagagtggggaaatggggatcttaccaggtcacattccaactgttgcaccattaaaaattagtgcagttcgtctgaaaaatggtggacacactgattatgtagcagtaagcggtggctttatcgaagttcgtccagataaagtgactgtattatcatcatctgctgaagaagcaaaccatatcgatatccatcgcgcaaatgaagcgaagcgtcgcgctgagcaacgtctgcaagataaacaagcacatgttgactttaaacgtgcagaaatggcattacaacgtgccgtgaaccgtttaaacgtttccgatatgaagtgaaaaaatccgtaagggctttgcctttacggattttttttttgtgtattttatggataattttacaaaactggtataattatattgatgcttgtataagtagaagtgtacaacaatttatatttcataaaggggatgaatcaatgattggtgaaatgaagcgagaagcattgtactctttaaagggaaaatggggactaggtgttggatcaacaattttatattttattttaagttatgtcgtttcgatggctgcaatgcttatactattaattccaggaattattatatttctcttatttgctggtctagcaggttcacttgaagggcaaacaatatcaaatggagcaagtgttacattcgggattttttattgcattatgataattttgagtagcgcatcgtatgggattacatcatacggttatacaaatgtatttttacagatcagtatacgagaagatgctaaagtagattacttatttgaaggatttcgtggctttaaaagaatgatgaaaacaatgtgggcaatgcttgcaattttattatatacaggtacatggattccgatattgttagtagccttatttgcattttttggtgaagaaggaaatgcgtcgtttgctattgctatctgtgtactactagaaatttcaattgttggtatgattgtgatgtatttttcttatgcactgacgtactatgtgatgattgaaaatccagaatatagtgtttcgcaggcgatgaaggaaagtaagaatcttatgaagggtcataagttagatttgtttcttttatggctgagcttcataggatgggctattttagcgcttcttacttttggaataggatttctttggcttagtccgtatatgagtacgacgacagcacacttttatcgctatatttcaaaaggtgaatttcaatagtaacatgctatactaatagaattattgtgtataggaggcgaggctacgcatgattagtgatttaaaaggagaagcactagattcattagaagggaaatggggattagctgttggagctacactactcatttcaattcttatcacggcttttagttttagtgttgattggggattttctttaattttcggttggcaaaaaacaaatggttcactttcaacgaatattcttacattttttgttactggaccgttaactttaggtggatattaccttggtttaaatatccttcgtgaaaagcaagctagtattggtaatatattcatttggttttcagagggaaagagatttctaaaatcatttttattatatttattagtaaatctttatcttttcttatggacgttattgttcattattccaggtattattaaatctttttcttatgcgatgacatactttattataaacgatcatcctgagtattcactgaaccaagctattacagaaagtcgtcgtatgatggatggacataagatggagtatttcattttatgtttaagttttattggctggtttatattaagttgtattacattaggaattggattcctgtggttaattccatatttctatacgacatctgcagctttttacgaagagatcgcagaagaatattatgagaaaaatatttagcattataaaatccccagtatgaattatttgttcatactgggggttttttgtagaaattttataaactgattactagtaagtggtttactgaaatagtaaccttgcatatatttacagttatgtttttgcagaaacttaagctgtttttcggtttcaattccttcggcaacgactgaaagatttaaagtatttgcgagggaaagtattgtagaaacgatggctcgttcttcaggacgatgatcagctaattgtgtaaattctctcggtacttttaatgtgtcgattggaaaaattgataaataagcaagagaagaatacccagtaccgaagtcatcaatggaagtttggataccgtattcttttaattgcttcagtcttaataacgtttctttctcgtcaatcattgcaatcctttctgttaactcaagggttacatattttggatcgacttgcacgtcgtttaatatttgtgaaatgctttcaattaattgatcttgccggaactcttttgcggatagattaacacttatttttaaattttggtagccaaaggtatgccatatttttaattggagacaagcttcttgtaatacccaatgtccaagtgggactacttgtggcgtctcttctacaattggaataaactcacatggtgaaatgtcacctaatagtgggtgtttccaacgtattaaagcttcagcaccgataattttatttgttgtcgtatcaatttgtggttggtaaacgagataaaattctttgtttactaaagcgatgggcaaatctttttcaattcgagcttttcgttccatttttttatatagttctttcgtgtaaagagagctaccgttttttcctttattctttgcttcgtacatggccatatcagcatgctgcaaaatggatagcgcatcttcacctgcttcaggatatattgcaattccgatgctcggtgagatttgtaaatgttgattttcgatttcaaatggctcattcatggccgctacaatcctatcagctattttttggacatctggcttttttttgtaattctcgataaggattgtgaactcatccccagctagccgcgcgagtttcatatttgatgttgctattctttcgagcctttttgctactgcgatgagcaacaggtctcctactcgatgaccgagggtatcattaataactttaaaacggtctaggtcgagaaacataacagcaaaaggctttttcgatatttttgctcgcgcaattgcctgttctaaatgttgatgaaatgcacgtcgatttgcaagctctgttaaagtgtcatggtatgctaggaaattaatttgttcttgttgttgcttgctttctgtaatatctttaatcattaaataaaccccagaaattttctcctttaaaaagatcggtacggcggtaacgtgcaagtagtaaatatctctgtttttatggtacgcccgtatttctaaagagatagaatacccctttttcacgcgatgaaaggcgttaatcatttcttctaaatcttcttcgtatatgagtgaatagtaaggctggtttaataattcattcgtttgataaccgagtaaagtagtaccagcgttatttactttgagaaaattaccgtacaaatctaatgtgaagattggatctggatgatgctcgtataaagatttaaacatttgttgattatgatagaatgatagagttcatttttctgttctactaaatcttctgtacgtagtttaatttgtttctcgagttctgagttgaattgcatttgagctagcaataagattttattttgttttcgaactaaactatgacgtatgagaacgaaagagaaagttattataagtccgattactataataggcgcaaaaacgtattcaactaatatgaaaacaataagcattactaccgaaatatacggtaatgataatcggattgattcaccaattttaggtgttagtagtacttgttcttgtttttcaggcttttttgtatggagaatacaggcgattgctactagtactaaggttacttgatagaaaggagtaactgtaaacatagaatactctggtatgaagtattttatatacgcataaatcgcatctgtagtagcatataaaattaaagcactgccaagaagtgcaccgacctttttaggtaataaggatagtggtttgaataaaaggttgattcctattaagagaaagagtaaatcagccattggataggtaagttgaacaaatatgtcgatataggatgttgtaaagatatgaatagttcgttcaataagtaagtagtaacttaaagtaaattgggctgtaacgataatacaaatatcacatagcataaaaagtttttctaataaatctcggttataaatgatttcgtatagaaaggcaaacgtaaagctaactaaaaaaagtaagtaaaaaaagtcagatggatcaacgaacgtatagaagtcctttacaattaaacgctgataggcaacgactatatcaccgataaaataagagagagctccaacagataatatgatccaaaataaacgagatagcccttctttcatgtttgaaaaataaagtaaataactacaagcgataatatcaattaatagggtactcattccgattaatagctgaaaagaaaatgagtattcatatagaaaaggcatcgctacatagtgaagcgttatagacagcaatacaatgcttataagaatacttacatgtgtttgttttttcatttatatcacctacggtttcttgaaaagcatatataagttttatatttattttgcacaattatagcaagttgtaaagatagattttaataattcttgtttctgcctcccaacatatcgacataggaatttgaattttgctataatgattagaatagttgcattatttagaaaaatttaaaaataataattactgcaactaggacatattgtttactatgtgaacttgttcttaatttaggggggagggtttcacaatggcaagtgtatatgaaaatagttatatgatcgttttgattttcttgctattaggtatattgctgccggtagtggctcttacattaggaaggatgctgcgcccaaataaaccaagtgcagcaaaggcgacgacgtatgagagtggaattgagccttttcatgatgcaaatattcggtttcatgctcgttattatattttcgctttattgtttgtgatctttgatgtagaaactttatttttatatccttgggctgttgcgtatgacaagctaggtttatttgcattaattgaaatgctcatctttgttgtaatgttgctagttggattagcgtatgcttggaaaaagaaggtgttacaatggttataaattttgaggaattacatccaaatgagcgagcagaattagaacgaaatatctttttttctacattggaacagttgaaaggatgggcgaggagcaattctttatggccgatgacattcggactggcgtgctgtgcaattgaaatgatgggagtaggttcatcacattatgatttagatcgatttgggtcattttttcggacttcaccaaggcaatcggacgtcatgattgtatcgggaacggtaacgaagaagatggctcctattgttcggcgcttatatgatcaaatgcccgaaccgaaatgggttattgcgatgggatcttgtgcgacagcaggtggtccgtatgtaaattcatatgctgttgtgaaaggtgtagaccaaattgtaccagttgatgtgtatattcctggttgtcccccaaatccagctgctttaatttatggaatcaataaattaaaagaaaaaattcgttacgaagcaaagaccgggaagcaggtgacgaataaatgagcaatccaaataaagatttagaggagctgaaaaaagaagcagctaggcgtgcaaaagaagaagcgagaaaacgccttgtagcgaaacacgaggcggaaataagtgagcttgaggaagaagatcaagaaaaagagaaagcgctaccaaaaaacgatgatattactatagaagaagcaaaacgacgtgcagcagcggctgcaaaagcaaaagtgacggcgttagcgaagcagaaaagagaaggaaccgaagaagtaacggaagaagaaaaagcaaaagccaaggcgaaggcagcagcggctgcaaaagcaaaagcggcagcgttagcgaagcagaaaagagaaggaaccgaagaagtgacggaagaagaaaaagcgaaagccaaggcgaaggcagcagcagctgcaaaagcaaaagcggcgacgttagcgaagcagaaaagagaaggaatagaagaagtaacggaagaagaaaaagcgaaagccaaggcgaaggcagcagcggctgcaaaagcaaaagtggcggcgttagcgaagcagaaaagagaaggaatagaagaagtaacggaagaagaaaaagcgaaagccaaggcaaaagcggcggcgttagcgaagcagaaaagagaagggacagaagaagtaacggaagaagaaaaagcgaaagccaaggcaaaagcggcggcgttagcgaagcagaaaagagaagggacagaagaagtaacggaagaagaaaaagcgaaagccaaggcaaaagcggcggcgttagcgaagcagaaaagagaagggacagaagaagtaacggaagaagaaaaagcgaaagccaaggcaaaagcggcggcgttagcgaagcagaaaagagaagggacagaagaagtaacggaagaagaaaaagcgaaagccaaggcaaaagcggcagcattggcgaagcagaaagcctcgcaaggtgatggggattcgggagatgaaaaggcaaaggcaattgcagcggcaaaagcgaaagcagcagcggctgcaagagcgaagacaaagggggctgaaggtaagaaagaggatgagccgaagcaggaagaactgtccgtaaatcagccgtatttaaatcagtatgttgaggctattagggagaagttaggagagggtgcattagtagattcctacattaataaactgtcaaaggatgtgccaactcttgtggtggatcccgaaaaatattatgaagtgatggagtcactgcgattccatgagggacttgcttttgattatatgtcagagctacatgcgacggattttgtgacacatatggaagtgtatgttcatttgttttcatatagtaagaaacaatcggtagcggtgaaggtaaagctagaccgagaaacgccgcaagtcgaatctgtgacagcgctttggaaaggggctgactggccggagcgagaagcatacgatttgctcggcattatatttaaagggcatccgaatttaacacgtattttaatgccagaggattgggtaggatatccgcttagaaaagactatgaaccgtatgatgtggaggtgtagctatgatccgcacggaagagatgcttttgaatgtaggacctcagcatccgagtacacatggtgtgttcaggctcgtaattaagattgacggggaaattattaaagaagctacacctgttattgggtatttacatcgcgggacggaaaagatcgctgagagcttacagtatacgcaaattatcccttatacagatcgaatggactatttatcagctatgacgaataattacgtcatttgccatgctgtagagacgatgatggggcttgaaattccagagcgtgccgaatacttgcgagtacttgcgatggagctaggaagaattgcgagccatctcgtttggtgggggacaaatcttcttgatataggagcggttagcccgtttttgtacgcttttcgtgaacgagagatgattataaatttattaaatgaattatgcggggcacggcttacttttaactatatgagagttggtggtgtgaagtgggatgcgccagatggttggattgaaaaggtggaagagtttgttccgtatatgagagagcaactggcaggttatcatgatcttgttagcggtaatgagattttcttaaatcgtgtgaaaggcgttggtatatatagcgcggaagaagcgatttcgtattctttaagcggagcaaatttgcggtgcactggagtaaactgggatcttcgcaaagatgagccgtattcgatttatgatcgttttgattttgatattcctgttggaagcgtgggagatgcttgggatcgctacgtttgccgaatgcaagaaatcgaggagtctttaaagattgttgagcaagcggttcagcagttcccgaaagatggagctgtgctggcaaaagtaccgaaaattattaaggcacctaagggagaagcatttgtacgtatcgaatcgccgcgcggagagattgggtgttatatcgctagtgacggaaagaaagagccgtaccgtttgaagtttcgtaggccatctttttataacttgcaaattttaccgaagttattgaaaggtgaaaacatcgctaatttaattacgattttaggtggagttgatattgtacttggggaggttgatggctaatgattgagacgctcttacaatcaccttcaagctggacgaatttcttcatttttttcggattagcggtacttctactatttgcagtccttggcttcgttacatatggaattttggcagaacggaaagtgatggggtttatgcaagggcggattggcccaaaccaggttggaggccgatttggtttactgcaaacggtagctgatgttttaaaactattattgaaagaagatagtattccgaaagcagcagataaaccgctgtttatattagcacctgtcattgcatttgcaccagcatttatggtgcttgcagttatcccgttcactgataaatttcaatttgcagatattggagtcgggttactttattatatcgctgtttccggtattacgacgataggtgttgtaactgggggatgggcatcgaataataaatattcccttttaggagggatgcgtgcggcggcgcaaatgatttcttatgagattccgctcgtaatgagtgtaattggtatcgttttgctagctggtagcctgaatttaaatgagattgtagcggcgcaggagaaggtttggtacattttcgtacagccaattggcttcgtcgttttcttaatcgcagcagttgcagagttaaatagaacgccattcgatttgccagaagcggagtcagaacttgtttctggatatcatacggaatactcagggtttcgctgggcgtttttcatgctttcagagtacgtatatttcttcgggatggcatcgttaattacagtgctctttttaggcggatggaatccagtcatgtttcttggatttatcccaggtgccgtatggtttgctttgaaatttagcagtgtagtctttctattaatttggttccgcgttacgttcccgcgtataagaggtgaccagttaatggagtttggttggaaagtattattgccgattgcacttgcaaatattttcttaacggcattgattaaggagttattcttctaatctatgaggggggtgccagtaagagatgaaaggactatttaaaggattaaaatatacattaagtaatttgagcaagaagaaggtaacgtatgattatccaaatcaaccgttgccgttgccagaccgttttcgaggaattcaaaaattttatccggaaaaatgtattgtttgtaatcagtgctctaacatttgtccgacagactgtattcagttaacaggaaagaaacatccggatcctacgaaaaaaggaaaaattatcgacacgtatgatattaattttgaaatttgtattctttgtgatttatgtacagaagtttgtccgacagaggcaattgtcatgacaaataactttgaactcgcggaatattcacgtgatgacttatttaaaaatttgcagtggcttgacgaaaacgacgaaaacgtcaggaaggagaataaggcatgaatggcgagtttgtagcattctttatactatccttgtctgcaattatcggcggtgttcttatgttgaacttaacgaaagttatgcacatgatgctagctctcgttctgacatttctcagcattgcaggtttgtattttcttttatcagccgaatttataggcgttgcacaaattttactttattctggtgcaatcacaattattatgattttcggcattatgttaacgaaacataacgcggaaaatgaatcgcgtcttactcttcgaaaatggattatcttctttgcagttgtagcatttggagcggttatgtatttcgctgttaataatgttgattttgcaaatgaaagcacacaaggaagtttacctctccatgaaaacaacacacttcaaatcggtacgcttctctattcaaaatatattattccatttgaactaacttcagttattttacttgtagcactcgttggcgcaattatacttgcgaaaaaggacgagaaagaggaggattccaatgagtagcgttccagcttctgcatatttaacacttgcgattattttgttttgcatcggtctatttggagctttaacaaagcggaatacagtaatcgtattagtttgtatcgaattaatgctgaatgctgccaatttaaacttagtggcgtttagtaaattaggcttatttccgaatttaacaggtcaaattttctcactgtttacgatggctgtagcggcagcggaagcggcggtaggactcgctattttaattgctttatatcgcaatcgtacgacagttcaggtggatgaaatggatacgcttaaaggatagcattgtgaccgaaaaagggggaaggaaacaatgatcgattatgcatggctcataccgcttttcccactcgtttcgtttttgttacttattatattcgggaagaaaattagagaaggaagcagcgtacttagtatttttttcgtctttctctcctttatacttgcggtacttgtgttaatagaaaggttttcagaagcaagcgtgaagcataagtgggtgtggcttagagctggagatgtggatatatcattcggctttgaagtgactgcattaggagctttaatgttatttatcgtgacgcttgtgagtctacttgtacatgtgtattcgaaaggttatatgaaaggtgatgaacgattaccaaccttttacgcatatttaggactctttacatttgcgatgttagggcttgttatatcaacgaatttattacagctttatatattttgggaattagttggccttggttcatttttacttatcggtttttatttctttaaagaagaagcgaaggctgctgcaaaaaaggcttttattatgacccgtattggggatgttggtttatttatcgggatgattttaattttttggtacgcaggtagttttgaatatgacgcaatatttagggcgatttatacaggggatctacctccttacatgattacaataacagcgatattaatttttatcggggcgatgggaaaatcaggtcagttcccgcttcatacgtggttgccagatgcaatggaagggccaacgcccgtttcggcacttattcacgcggcgacgatggtcgcagctggcgtatatttagtagcgacgatgtttcctctattttcagcaagtacagtggcgatgcagacagtggcaatcgttggagctttcactgcaatctttgcggcctctatcggtcttgtgcaaacagatataaagagggtgcttgcttattctacagttagccagctcgggtatatgatgctcgcgttaggttctgccggttatgtagctggtatattccatttaacgacacacgctttttttaaagcactattatttttggcggcaggaagtgtaattcatgctgtgcatacgcaaaacattaataaaatgggcggtttacagaagaagatgaaagtaactggtacgctatttttaataggtacccttgccattagcggtgttccgctgctttccggttttttcagcaaagatgaaattttagcggcgacgtggatgaatggcaattacgttttatttactttagcggtaattgcggcgtttttaacagcattttatatgttccgcctatactttcttgtctttactggagaaacgaagacgaaggaagaagtgcatgaatcgcctcgcgttatgacgtatccaatgattgttctcggcgttcttgcggtagtggcaggatatataaatacaccatggtttgggacatttctcggagattggttgacgaaagatgtagggtttaaggttgaagaagcgcatggaccagtttggattatgattgttgcgacactcgtttcatttgcgggaatcgctcttgcatatttcatatatggcaagaaatcaatttctagagattgggctgggggtacggaaacatctctttataatcttttgaaagaaaaatattatgtggatgaactatacaacatgacggtgatccctattacgaaaggaatcgctcatgtgcttcgcttatttgaagtgtatgtagtcgaaggaattgcagttttaattggaagtgtagttaaaggcacaagtaatcttggatcgaaacttcaaaacgggaatgtacaagtgtacggtactgtaacggcggtttcgctcgctgtactcgtcattattttgctctatacgggaggggatttacgatgaatgatttgttgttaacgttcttcattttttccccgcttttaggaattttattgcttgtattaacaccgaaaaaggaattgcgtacagtgcgggcgcttggcttatttgggacggcacttccatttggaattgctatcgtcctcgcttgtacatatgcttctggaaagaatttgtcactatttgatgagaaggtgaaatggattaagttcggcgattttacagcggtggataaaaggtggttttctatttattacgagcttggtattgatggtttgtcgcttgtcatgatggtactgacggctcttctagcaacgcttgcagcaattgcagccttttctattaaaagaaatttaaaagcattttatatgctgttactcatgctagaaataggaatgctcggcgtctttgctgctcaaaacttaatgttgttttttatcttctttgaaattacgttgccaccaatgttcttattaattggaaagtggggaaaattgtcgagtgaaaaggctgcgtatagttatttaatatataacggtattggctcagctattttgctcattgttttctcaattttgtttgcgaaaacaggtacaacaaatattgtggagctgaaagagatattaagaagcataaacgcagagggagcactcgtcatcccaagtagtttgcagcttagtgtatttattgccataatgattgcttttgcaattaaactacctgtttttccgttgcaccgctggatggtcaatgtacacatagaagcgcatccagctgtagttatgcttcatgcgggtgttttgctgaagattggagcgtacggtattattcgcttcgggaaagggctattcccggaatattttcacgatgttgcaacactaattgcgatattaggcgtaattaatttattatacggtgcctttttagcgctcatccaaacggactttaggaaagtactggcttactctagtatttcgcatatgggaattgtgttaatgggacttgcgtcacttaatgcacctggtacacaaggagcgttattccaagttgtatcacatggtttaattgcagccttgctcttcttcctactgggtgttatagaacaacgatttggaacttcggatattacggtgctaggcggacttgcgaaaagtgtaccgatacttagcggattctttttagcaggaggaatggcatcgcttggattaccagggatgtctgggtttgttagtgaatttcttgcctttctcggtttatttcaaggagagcccgtcattgctgcagtcggtgtgattggcatcattttaaccgctgtatacgtattaagggcgacacttcaagtgacatttggaaagaaagagtgggaagcaaaatctgatatacacggatgggagtatgtccctgttttactacttatcttttgtattattgcaattggagttatgccagagttactaggggatccgcttcaaaatacattgaaaacattgggggtgaagtaggatggatatgaatacgttacttagcttatcgtggcatctaatggtgccagaatttattattctcggcgccgccatccttctttccatatgtgatttgttttttaagctgaatcatagatatgtagctcttggtgcgattgctgctatcgtattagcaatcgtgtcattaattacgctatatagcgaactagctggagatattttaaacggatcgtttgtgttagatggattttcaaaagggtttaaaacattgctattaggtgcctcagctcttattttatgcaccgcaatgagcgatgataagaagaatccaattgaagataagggtgaatattattacttatttttaatggcacttcttggtgcgatgttcatggcttctagtgttgatttcattacccttttcgttggtttggagttactttcactttcttcttatattttagtaggaatacgaaaaaagagccgtgcatcaaatgaagcggcaatgaaatacgtcattagcggaggaattggaacggcgattacgctcttcggaatgagttatttatacggtattacaggttcaactaacattgtagatatgcaaaaggtactcactggggaactcgctagtggtattcagttattgttagctctcgcatttcttttattgctagtcggtctctcatttaaaattgccacagtgccgtttcatatgtgggcacctgatgtgtatgaaggagcagctacaccagttactgcttttcttggaacgatttctaaaattgctggtttcctactcattattcgtttgttccttatggtttttgcaagtgtattaatacaaggagatatgcaatctttatatgggcatatgagtatatatattgcggtgctagcaagtattacgatgattgttgggaatgtagtcgcgttaaaacaatacaatataaagcgtttatttgcttattcgggcattgctcatgcagggtatttactcgttccacttgtcgcattatcaccatttacgatggatagcatgtggttttatatgctggcatacatgcttatgaatataggtgcatttgctatcatccacggcttaatcttacaaaatgatgaggaaaatataacgattttcacaggtttatataaaaggtcgccatttgcagcgattatgatgacaatttttattttatcgttggctgggataccaggaacggctggcttcatcggaaagattaatatctttttaggcgcgcttcatgtagatccagcacattacgtactagcttcgattatgatgggtacgacagttgtttcattcgtatattatttccgtattttacaacaaatgtttttccgcacaggagagacagaagagaggatacggttaccgttaaatataaaggttgttatgagtctttgtgcaatttcgattgtaatactagggattatgccgatgattgggtacaatttcttttatgaatattttccattaatgaaagatttcttcttcttagggaacgtggtacaatagtgaaaataaaaggtgtggagtcagtactctgcgctttttattttgtgttaacttgtaatgtagatatacgtttttggaaagaaaatcacgatgtaaaatgtaagatgtctatgtgcatttgaaaaagtgtagctcctacttattatggtatcgtttttatattctttcataagtagtagctgagtaaaaaggggtcgattttttggcacaacttttagggcaacaagcactgattgccattgtttcgcatttattgtttattaccattacgtggtgggccttacaaggcattcacattgagcgtttaatgaagtccggaaaagtgctgcagacgcgagtattactcatcttaattacaattgcaattgggacatctgtaagtaactttttccttgattatttaggctattcgaagagtttaacgtatttagtaaagtaagtgtatagaacctcaaatctccgttaacaatggggataggaggggatgaaattgaagcttaaagccattcttattgttgcacttagtgttgttttatttttggttggatatagagagatgaaaccgataagcgatgaacagaaaatggagagcatgatcaaggctttagagaaaaatgatgctaaagtagaaaaatggtcatggttagcgagagaaacaaaaacaatttctaacatacatacgtttcaaaagttgttaaacgatgtgaaggaaaaggcaaatattcaaaagtgggaagtagagcaatctccagatggatataaagctacatcctataaaaagctttcttcttatgaagaacgagtagtagtaacttggagtaaagaaaatactaaagaaaacactttcattatctttgaagtaagtggggcgaaatgggacccgaagtatgttcaaaacatgaataaaatttttagtgaaaaacctataatttacacttgtgttcaaggtgtactgaatgataagattgaaggtgttttgcaaaataaaaccaatcaggttttgaaagatctttcagcaagagcgatcgaacaagtagaagaaagagcatttgtgtcagtctccgcatacaataaaaagtgggatgacgctctttcaacaaatagagagaaaataaatgtgcaaatagcaatacgttctacagacaacaaagatacaattgtggttggcacaccgatcataacttctgagtattgagtgaatagatactgaaaaaaggacacggaggggaataatttggaaaagatcatcgtccgtggcggaaagcggttaaacggcacagtgcgtgttgagggcgcaaaaaatgctgtattacctataatcgctgcagccctattagcgagtgatggaaagaatgtactatctgaagtaccagttttgtctgatgtatacacaattaatgaggtattacgtcatttaaatgctgaagtcgtatttgaaaataatcaagtaacaatcgattcttctaaagaactaaacattgaagcaccatttgaatatgtacgtaaaatgcgtgcatctgttcaagtaatgggaccattattagcacgtaacggtcgtgctcgtattgcacttcctggtggatgtgcaattggttcacgtccaattgatcaacatttaaaaggcttcgaagcaatgggagcgaaagtacaggttggtaacggttttgttgaggcatatgttgagggagaactaaaaggagctaaaatctacttagacttcccaagcgtaggcgcgacagaaaacattatgtctgcagctacattagcaaaagggacaacaattcttgaaaacgcagcgaaagaaccagaaatcgttgacttagctaacttcttaaatgcgatgggagcgaaagtacgcggagctggaactggaacgattcgtatcgaaggcgttgataaattatatggtgcaaaccattctattattcctgaccgtattgaagcgggaacattcatggttgcagcagcaattactggtggagacatcttaattgaaaatgctgtacctgaacatttacgctcaattacagcaaaaatggaagaaatgggtgttaaaattattgaggaaaacgaaggtgtacgtgttatcggcccagataagttaaaagcggttgacattaaaactatgcctcacccaggtttcccaacagacatgcaatcacaaatgatggcattattactacaagctgatggaacaagcatgattacagaaacggtattcgaaaaccgctttatgcacgttgaagaattccgtcgtatgaatgctgatattaaaattgaaggtcgttctgttattatgaacggtccaaacagcttacaaggtgctgaagtagcagcaactgacttacgtgctgcagctgcattaatcttagctggtttagtatcagaaggttatactcgtgtaactgagttaaaacatcttgaccgtggctatgtaaacttccataagaaattagctgcattaggtgcaactattgaacgtgtaaacgaaaaagtagaagaagtgaaagaacaagaagtttctgatcttcacgcttaattgaaatagtctctatgtcttttgacataggggctatttttttgggttattactgttatagtcaataaattctatacttatgcacgtaccagtaaaaatatttagaaaatttctgttttatactcttccccttaagtatgttctaaaagaaagagttgttccataagaatgaatggagtaaagcttttatattgggggaaaataggatgaaattttcaaagccactttttattacagtagcgctcttaatagcgctcgttatcattgtacctgcagcccttgttattccatttgcgaaagcaaaagtaggggaagaaacggcctctaaaactcctccagcgatagaaagcataccagctccaggaaaagtagatacagctgttcaagttgctgtatatcgcgaaaaacagaagaaggtagaaacattaccagtggaggagtatgtgacaggtgtagtagcttctgagatgaatgccagttttgaaatagaggcactaaaggcgcaggcattagcagcgagaacatttgtagtacaacgtatgttaagcggaggaaagaaaaataatgcggacgtgacagatacggtgaaagatcaagtgtacaaaagcaaagatgaattgaagaagcaatggggcaataactacgaaaataatttgaagaaaatcgaagaagccgtttcgaaaacagcaggacaagttttaacgtatgatggaaaaccaatttcagcatccttcttttcaacgagtaatggccgaacagaaaatgcagctgactattggggaaatgattatccgtacttgaaaagtgtagatagtccgtgggatcaagcctctccaaagtttacgagtgagcaaacatttacagtagctgattttcaaaaacgtctcggtgtgaaagtgttagcagacgggaaggttggaaatattaaagaccttacggaaggaaagcgcgtaaaggatgtagcttttcaaggaaaaacattaacaggaaaagaagttcgtgaaaagttagatttacgttcttctgattttacgtggaaacaacaaggagataaaatcatcgttacgacgaaaggcttcggtcacggcgttggtatgagtcaatacggggcgaacggcatggcagcggaaggaaagaaatatacagatatcgtcgctcattactataaaggcgttgaaataaagacgatgaatgattatgaaggaaaattgatggtgaagaaataggtgtcagaactctggcgtctattttttttatgtaaaatagaataattttccattaattgtttgatataataggataaaaagacatttgggggagacgaaatggcgctactggagttgaaacagttagggaaggcgaaccagttaccggaaattgagctaaaggttgaaaaaggacaatgtattgttttgcaatgcaataatcatacagctaaagtgttacaccgcattattattggtcaagaagaagcttcaactggcaacgtactgtttgaaggggaagcaattggaaagaaaaattattcccgcataggcttttgttttttgaaggatgaagcatatgatcgtttgaaggtgaaggaatactttaagtttttaatagggctttatgaatcaaagataagtataaaagaagttgtgcagtctgttggtctcctagataagctaaacgttaaaatagaaaaactatcattttcagagaagcgtcgtcttcatattggacgaatgatgattcataatccggatttaatcattttggaagaaccggagcaaaatgtagatatagagagtacggttattattcgaaaagcaattatgaaaatgaaagaacaaggaaaggcaatttttattacgtcatcttttctatcggatgccctttcgttaacagaggatgtatacatattaaacaacgatggtgtgaaaaaagtagaaattgaacaagaggaagcagaagaagtcgatgaagagaaggtcgttcaaataattccgcaaatgaagttagaaagaatacctgcgaaagtgaacgataaaatcattttacttgatccgatggaaatccatttcattgaaacacaaaacggagtaacacatattcacgttcgtgaaggagatttcgtatgtgcattaacattaagcgaactagaagcaaggttaacaggttttggtttctttagatgtcatcgctcgtaccttgtgaatttacaaagagtgcgagaagtgattacttggactcgtaacagttttagcttaattttagacgacgaaagaaaaagttcaatcccgctttcaaaaggacgaatggatgaattaaaaggtgttattggactataaaagtgctccaataagctcaatatgcgattcattcaccggtaaaaatactccttttaccggtattttaatgcgcctaccctttgtttttcatatgattgagtcaagaaaagcgaaacaaacgaacgaaaagcgctaaagcgactttcatctataaagaagaaaaacaaaggggatgaagaaatgacattggcaattgaaatgaaagatgtaatgaaaagtttcagtggaaaaacggcacttcgaaatgtaaatattgaggtgaagcaaggagagatattcggattccttggaccgagtggatctggtaagacgacaacagtaaaaattttaacttctcaattgcttcatagtgttggaacggtaagagtattagggaaagatattacaggaccaagtagcatcgattacaaacgaattggtattttaacagataacagcggcttatatgaaagacttagcatttatgataacttactattattttgtgacttatacgattgcaaaaaagaacgaatcgatgaagtactagcacaagtgaatttattagatgataaaaaaacaccagtaaaaaaattatcaaagggaatgaagcaacgcgtcacactagcaagagcaatccttcataaaccagatatcctcttcttagacgaaccaacatctgcacttgatccagtaaacgtacaaaacattcataaaatcttaaaagacttaaataaagaaggaacgacgattttcttaacgactcacaacatggacgaagcagaaacgctttgtaaccgcattgccttcctgtgtggcggagagattgtagcacttgatacaccggagaaccttcgcttacaatacgcgaaagatcaaatacaagtcgtgttaaaggataagaagaaagaaacggtacaaaaagatgaattaggtgcaaaacgtatttcagaatggatgaacaaaggagaattactatccattcattcacacgaaccaactttaggcgatatctttattgaagttactgggaggggattataatgacattttcaatgagacgtgtatcagctatttttagaaaagaagtacaagattttaagacaaattcacaagtgttgttaatggcatttttaccaattatactttcatttttgtttagcagatttggagtgggaaaggaaatgttaggcattactactataacggccttcctatttgtcgcagggtttgttcaatctatggtaattgcagaagaaaaagaaaaacatacattgcgtgtattaatgctatcaccggcatcttcggttgaagttctacttggaaaaagtatattaacagtatgtttgacattgggcatttgtattgtgaacttatttattttggatcaattcagtggaaatctattattgctaggatttattttcttatgtggaacaattttatttattgtgattggaacaatgattggattgttagctgcatctgtaccacaaacatcaataattggaatgccgatattaatgacgatgtatttggctgtacagtttgagccaatggttgaaaataaagtaattaagacgatgattggatatcttccaacatctcatattgtgaaagcacttaacagtttagtaggtggggcgggatttggtagtattagtgggcatgtattaaatgttgcagtttggcttattatatcgctctttgtatgtttaatcgtatataaaaagaaacaattagattaaaaactgagccaaaagtgctcagttttttcttttttctatcatttcctcggaaattttacaattcttatacatatttttacagattttgtcgaaaagtaattagttatacgttgtataggatacgtgaatattgttcaaaatgattgctgaggtgatgatggaatgcgaggaagaaataataaaaagtcgcaaaaggtagtacatttatttcaaaaaagatgggtgtttccggcactatacattgcttgtgcagcggtaatcttaatggttgcgctatggttccaaggagctaatccgaagaagactccaaaccacgatcaagcaacaccgtatacacaatcggaagatccagcagtaccagtaacaaaatcttcagaagtagtgaaaatgccagctgccgcgaatgcggaagtagtcgtacagaagaaattctatgaagatgcagcaactgaggcggaacaagaaaaagcacttgtcttttataacaacacatattccccgaataaaggaattgacattgctgcgaagaatggaaaagaattcaatgttgctgctgctttaagtggtacagtaacgaaagctgaaaaagattcacttcttggttatgttgtaacagttgatagtggaaatggtgtagcggtatcttatcaaagcttaggcagtgtgaaagtagaaaaaggtgcaagagttgcacaaggtgaagtattaggaacatccggtctaagtgcaatgaataaagaggcaggttctcacgttcactttgaagtacgtaaagacaatgtggctgtgaaccctgaacgttacttaaataaatcagtaacagaaattaaagctgatgcaggtgctgcaaaggctacgaatgcttctggtaaaaaagctgatgacaaatctcaaaaagaagagaagtcaacgagcacgaaacctgaaagtaaaacagaagacaagtctcaaaaagaagagaaatcaacaagcggttcaactagtgacaaaaaagaagaaccgaagaaagaagaaaaatcaacaaatggttctacagaatcatctaacgattcttcttcacaagaataatgaagtgaaaaaatcagttcccactaggggagctgatttttttatttttatataaaaatactcaatttcgagaaaaaagttgcaataacaaggaaaaatgacgagattctcgaatatatattacaaaagggaggggatactgtgtcatttttgtttgttctgtcgactgctattattttattgtttgttttattcactttatattattacattgccggtaagaaagaggttccccaccatcaattgttagaagaagaattggaacgagaagaatgacaccttatatataaggtgtcattttttttcgctataatagtcagttttaacgtatttctcacaaaaaaacgtaatttttcttaacttagtccgcaaaaatagtgaacatgtagcatatatcagtagtgcgggcaatacaatggtataaaccaaagcaaagagagtgtttgaggtgagaaatcgtgaatcatttcattataaatccaagaatgtttaacgcttacaaacagcactcacacttacttcttagtcgtatgcagcgaggctcatttcacccttctcacatccaaattagggaggcgagtggtgtgcacgattacatcaaagagagaactatcaagattggtaagtatatcgtggagacaagaaagacagtgcgtgtcattgcaaaggaatttggggtatcaaagagtacagtccataaagatttaacagaacgtctaccagaaattaatccagagctcgcaaatgaagtgaaagaaattcttgattatcataagtctattcgtcatttaagagggggagaagcaacaaaacaaaagtatagaaaagaagatgtagagaagcctgtacgtcaataatgttacagtagcaaacattccgttcacattcggtaatatttttcagaagaattctttttgcgaatattacgtttctgttaaatttatgataaaatcagaaattaggtgaaaagaattcgggtgtaacctgattttgaatatcgaggaggaaaaaacgggaatgtttgcgcgagatatcggaattgacctaggtacggctaacgtattaattcatgttaaaggtaagggtattgtattaaatgagccatctgttgtggcaattgatcgtaatagtggtaaagtattagcagtaggtgaagaagcgagaagcatggtgggacgtacgcctggtaatattgtagcaattcgtccacttaaagatggtgtaatcgcagactttgaaattacagaagcaatgttaaagtatttcattaacaaattggacgtaaagagcttcttttcaaaacctcgtattttaatttgttgtccaacaaatattacatcagtagaacaaaaagcaattcgtgaagctgctgaacgttcaggtggtaaaacagtatttttagaagaagaaccaaaagtagccgcagttggtgctggtatggaaatcttccaaccaagcggtaacatggttgttgatattggtggaggtacaacagatatcgctgtactatctatgggtgatattgttacctcttcctctatcaaaatggctggcgataagtttgatatggagatcttaaactatattaaacgtaagtataagctattaatcggagaacgtacttcagaagatattaaaattaaagttggtacagtattcccaggtgcacgtagcgaagaacttgaaattcgcggacgtgacatggtaacaggcttaccacgtacaattacagtatgctctgaagaaattacagaagcattaaaagaaaatgcagctgttattgtacaagctgcaaaaggtgtattagagcgcacaccaccagaattatctgcagatatcatcgaccgcggtgttattctaacaggcggtggagctttactacacggtatcgacatgcttctagcagaagaactaaaagtaccagtattaattgctgaaaacccaatgcactgcgttgcggttggtacaggtattatgttagagaatatcgacagattaccaaagcgtgctttgagataatttgaaagaactaaggctaatgccttagttcttttttgtttttatatttttttattttgtttttttgcgaaaatggaaggaaaatagagaaatatgaaggaaacaggtaaaatattcatatatatggttaaatttaatatttccttaattgaaaacgtttataatataatgagtcgaatacgacattaaggcaaataatgtttcaatacatattgcctttccctaatttgggcatacactcttttccacctccgtgtcagttgcaaaaatgtgcaactattttaatggaatagagtgtgtgcattttttttaggaagttgtactaaatataaaatgttactttgtaatgacaaacaataaacaaaatgggataatagcaatatgtccaagtggtaagaccaatattacaaaaggggcgattgttacatgctaaatatagaacaaattaaagaaatcattcctcaccgctatccatttttacttgttgataaaatattagaagtagatgaaggaaaaagagcggttgggattaaaaatgtatccgcaaacgaagaattctttaacggacacttccctgactatgcagttatgcctggtgtacttattgtagaagcattagcgcaagtaggagcagttgcagtattaaagaaagaagaaaaccgcggaagacttgctttctttgcaggtatcgacaattgccgtttcaaaaaacaagtacgcccaggtgatcagcttcgtctagaagtagaaatgacacgcgtacgcggcccaattggaaaaggaaaagcaatcgcaacagtagatggtgaagttgcatgtgaggcagaaattacatttgcgattggtgataaaaaagaatagatagtactgaaaaatctccttgtgaaaagacaaggggattttttaatttctgctatataacgatgaaacaataatatacaaactaatcagaaaataacttgtaaatagatggaaattaccatatacttactttagtatttatctagaaaacaggataagtgataaaggtaataaagaaataagggcattgtcatattgttaaggtacttaagtaagacaaattagaatgttattgattatgatgagatatggggaaatcagcaaaaatattaattagacgtatgaaatcgagcataagagagagaaaagggaaatgtcgcatttcacaaaaggagattatgaatatgttcgggagaaagaaaagaaaaccattacgacaattaattacacataaagagcctaaatcgcgtattacagaacaataccgtaacattcgtacaaacattgagtttacatctgtagataatcatgttcgttctattattgttacttcggcagatccaggtgatgggaaaacaacgacaatctcaaacttagcagttgttttcggacaacaaggaaagaaagttttattaattggagctgacttgcggaagccgacgatacaaaacttatttgccattcatagttcaaatggattaacgaacttattatcaggacaagcaaaacttatgcaatgcattcaaaaaacagatatagagaacgtatacttaatggcagcaggtccaatcccgccaaacccagcagaactattagggagccgggcaatggacgaggcattgctagaagcatataacatgtttgatattatattaatcgacacaccacctgtgcttgcggttacggatgcacaaatactagcgaacaaatgtgatggaatcgtactcgttgtacgaagtgaaaagacggaaaaagataaaatcgtaaaagcgaaacaaatattagataaagcatcaggcaaaatacttggagtcgttttgaatgataaaagagaagaaaaagagcagtatggttattactaaaatagaaacaggccaacaagaaatacttgttggctttttttgtattcttaaatttatttctcaagttacatagcataaaaagcatgatatgataaataatttggagaatcattggaatgtgttgtcatatttaagattattttgtaagattatacttgtttcttgtgaacaaatatagaactaaattattaaaaataaaaaatgtaagatttatatgttataatttttcctatgtgtaaattttagaaagttggaggaacctatggaagaaacaattagtttaaaagagttatttcatatcttaaaaaaacgtttagcaatgatcctcgtaatcgcctttggtgcagctattgtaagtgctatcattagcttcttctttatgacaccaatctatcaatcttcgacgcaaattcttgtgaatcagaagaagcaagagggtgcaatgttccaagctggtgaaattcaaacgaatattcaattaacgaatacatataaggttatcattaaaagtccagtaatcttagaacaagtgaatgaaaaattaaatttaaatatgacatctcaagtgctaacaggaaagattaatgttgcgaatgaaaaggattcacaagtaatctctgtaacagctgaggataaagatccgaaattagctcgcgatattgcgaatgcaactgcagatgtatttaaaggtgaagttgcaaaaattatgaacgttgataacgtaacagtattatctaaagcagaagttgcagaaaatcaatctccaattaaaccgcgtccaatgttaaatgtggcaattgctttcgttgttggtttaatggcttcagttggtcttgcattcttactagaatacttagataacacagtgaaaaaagaagaagatgtggaaaacttacttggcttaccagtattaggaattgtagctcgtatggatgaagaaacaatgaacgtgaaatcacacgctccatcatcaagaaaagtgaggggacaaacaattggctcttaaattatttaaaaagaaaaagaatcatcgtcaacgccgtcaattaattgctcatcaacaaccgaaatcaccaatttcagaacaatatcgtaatattcgaacgaatattgaatttgcagctgttgatacgaatttacattcattaatggtcacgtctgcaaatccaagtgaagggaaaacaacaacgacagcgaatatggctgttgtgtttgctcaacaaggaaaaaaagtattattaattgatgcagatatgcgtaaaccagcaatgcatcaaatgttccaagtagacaatatttttggactaacgaatgtattaacacatagtgaacgtttagagaaatgtgtgcaaacaacactagttgataatctacactttttagcttgtggtccaatccccccaaacccagctgaattgttaggttcaaaatcaatgaaagaacttcttggacaagcatacagcatgtacgacttagttatttttgatatgccgcctattttagctgtaacagatgcgcaaattatggcaaatgtatgtgatgcttctattcttgttgttcgtagtgaatcgacagagaaagaaacagcggtaaaagcaaaaggattgttagaatcggctaaaggtaaattgttgggcgttgttctaaacgaccgtgaacgtgaacaaggcctatactactactacggtgcaaactaattttaaagtgagatatggtaaaaacatatctccttttttcccttgaatatgagcgatatctcatattcaagggaaaaaagatctttataggagagagggaggatgaaacaaatgatagatttacattgtcacattttaccggggatcgatgacggtgcacagacagtaacagatagtttagcaatggcacaacaagccgtttcagaaggaatacataccattgtcgcaacgccacaccatcaaaatggaaaatatgtaaatgaacgtacctcaattattcatcatgtaaaacaactaaatgatgaactacaacaacataatatgccacttaccattttacctgggcaagaggtcagattatatggcgatttattagaagactatgaagctggtaaaatcgttactttaaatgaaacaaataaatatatattcattgaattcccatcaaatcacgtacctcgttatgcagaacaactactatatgaattgcgcgtaaaaggaatgattccaattatcgttcatccggaacgtaatgccgagttaatcgagcggccagataagttatataatcttgtaaataaaggtgcattaacacaagtgacagcaggtagtttacttgggaaatttggaaaaaaaattaaaaaattctcactacagcttgtagaacataatttaacacatatgatcgcatcagatgcacataacacgacatcaagaggatttcatttagcggaaagctatgaactaattgagaaagaatttggaatgagtgttatgagtgatttgaaagaaaatccgtacttattaattagcgggaaggcaatttataaagaagatccagaacaaattcgtcgtaaaaaattgttcggtattttttaaataaagaattggtgatgtctcctaaccgttatcaacggaggcactcggtcgtgctgtgggtagaaatttttatttcgaacctaccttagacgcttgtcgtcgggagtatgacgtgaggatgggttggatgcccataatttatttatgttagaaactctacttatggagttgtaaagacgaccctataagtagggtttttgttattgttacatgtggatataataatatgtttgggggtactagatttgaaaaaagtaagaaaagcaattattccagctgcgggactggggacaaggtttttaccggcaacaaaggcaatgccgaaagaaatgttaccaattgttgataaaccaacaattcaatacatagtagaagaagcgatagaatcaggaattgaagatattattattgttaccggaaaaggtaaacgtgcgattgaagatcattttgatcattcctttgaattagagcaaaatctcttagaaaaagggaagtatgaaatgcttgagaaagtacaagcttcatcaaaaattaatattcattacataagacaaaaagaaccaaagggtctaggacacgcagtgtggtgcgcccgtaaatttattggaaatgagccatttgcagtattacttggtgatgatattgtgcaagcagaaacgccatgtttacgtcaattaatggatcaatatgaaggtacacaatcatctgttatcggtgtacaaacagtaccagaaaatgaaacacatcgttacggtattattgatccagttgaaaggaatgatcgccgttatcaagtacgccaatttgttgaaaagccagctcaaggaactgcgccatcaaatttagcaattatgggacgttacgtattaacaccagaaatctttatgctccttgaagatcaacaaacaggtgctggtggggaaattcagttgacagatgcaattcaacgattaaatgaaattcaacgggtatttgcatatgattttgaaggaaagcgttatgatgttggtgagaaattggggtttattaagacgacaattgaggtagcattacagcataaggaattaaaaaagcaattaataaaatatatgaatgatttagtacataaagaaatcaatgaataagattataagggagagggaatatgaagactggtgaaaatatagcgagagaatatcaagttacatcagatgatcaaatcgttcaagtcgaaaatagacaatccaagttatatttagggagtaagtatatattagatgttatattcgctttactaggcttgattatattggcacctgttatgttgatatttagtttactaattattttagaatccccagggtcgcctttctatttacaagaaagattgggtatgaatggtaggaagtttaatgttattaaattacgttctatgagaaatgatgcagaaaaaaatggtgcaaaatgggcagagaagaatgatccacgtattacaaagataggattatttattcgtaagacgaggattgatgagctaccgcaattatttaatattttaaaaggtgaaatgtctcttgtaggaccaaggccggaaagacctatgtttactgagaaatttgagcgtgaaattccaggttttaaaaagagactagaggtaaaaccaggactgacaggatgggcgcaagtaaatggtggttatgaaattacaccgagagaaaagttgaggctagatatatattacattaacaactccagtttattgttggattttaaaattatattaaagactattaaggtagtatgcacaggtgacggagctagataatgtatcttataaatacaggatggtattagtatgaacttacaattaattcttaaaaatgcttcatttttatttgtaggaaatgtgatggtacgaatgttaaccgccatttcagcaattgtgatagctaggtatcttggggcagaacaatatggtattttaagtattgcattagtattttccacttttgcaagttcaatgacagatctaggattaactcatacatttattagggagggtaccaaagctgataaagatatatctaaacttttaaatagctatttggtaacaagattattcatttgtatattctcctctgtaattgtatttattctagtaaattttatgtatagtcagaaagaaatgaaacaggtaattttcttgatggtaatccctacaatatttggtgcagcactacaaaatgtaggagcggtatattatcaaattatcgaaaaaatgaaatatactgcaattattcgaatcatggcaggcttaatttctgtcataggtcttcttattggagtttattttggatatagtcttttaatggtagccttaacttatgggctatgtagtattttagggggtattataagtatctcttttgtcattaataaaattaaattgcataaaggattagataattctattttaaatgggttaagtgcttttacgttaactgcttttttaacaatacttatgcctttaatgggacctattgctttagaaaaggtatctagtttagaacaggttggctattttaacgctgcattacgtatcccctctgttctatatcaaattccaggtattgtagcagcagctttttatccagttttgtttaagcttattgatagaagtgagctaaaaaaacatggagaggtaatagttatcgaaatcaagttaatgactttattgtctttaattatggttctacccataatactatttccagaagaaatttcagtttttctgttaggggaaaactggataggaattgctgaaacgctttctattttatctattattgtttttattcaatcaattaactttcctttagcggatagtttaacaactaaaggtttgcaaaaatatagatctattgcattattaattagttttgggacaggtatttttgcgtactcgtattttggaaagttatacggtagtttaggagcagcaatcgcagctgttttaatagagattgtactattactgggtttaataatttttaataagcagggaatatttaccgtgtttaggggtagttctaaaagtttattaagtttaatttttttgtatgtcataaataaattatttctaggaaatattaatatatttatctcattagtaataagttatctcattgttttaattgttattctatcagaaaaagatttaataaaaaatatgattcaaaaaaagaaatctattatgtagaggaggctataaatgtctgttcctgagatatctataataattcccacttataatgtagaagaatatatagaggaagcgttaagttcagtacttaatcagagttttaagcaattagaggttatagtaattgatgatggatcacgggataaaacagttgaaatcattcaatctttacaagatgagcggataaagctatatgaaaatggttctaaccaaggtccggcttattcgagaaactttgggatttctaaagcaaaaggtacttggatagcttttttagatggagatgactggtgggatcaagaaagaataaaagagttgcttaattttgctagaattaaagaagctgacatgatatttgatgatattttcctaatatatgatgggcatgtaagtccgtatgcaacacaatgtcaaaattacaaagaaaagcttgaatctagccttaatattaccccagagttattagtagagttagatttaggaatgcaaccgataataaaaagaaatctattggagaaaaaaaatataagatttaatgatcaattgatatttggggaagattatgttttttatcttgaggtactatgcgagtctaataaatgttatttttataataaaccgttatacttttataggcagaggggagattctcttacaagacaaaagacaaagagaatccaacagttaatacaagcaaatagggaactgttaaaacatgaaaaatttcaagggaataaaaaattaattaatcaattgcaaggtaggatggtaagactctcaaatctaaatttatattatagcttcattgaaaaaataaaagaaaaagatattaagggtatagtgaaaaatatatatttaaatcctaaggtaattttaatattaataagccgtttaccaaaggtcttaaaatacagactagggaaatttattaaaagtagaggttaaaatatgaaagacaaaagttttgtacttcaaaagatggatagtaagaattcttatgtttataactctattttcataatgttaatttcactattcattttatatgtgccggtagtaaatagcatgcaaccattaataaaagcaccatatagttattatgctaattttttaattatttttgtgctgtggttatttaattttttaaatagtaaaaatgctaattttactaaagaatatttgcaatcaatgggctgtttatatgtcttaggtctttactgtgctatttcaagtttttggagtgaaatacaatttgaaactttatggagaacatttataatttttggtcctattttcgcaatggcatacattgttaatgtagatcgaatgattgaaaaaacattgattgctagttataaaattcaaatgttagtaggtttatttttagctatcttaatgatatttattaaaatttttggattaatgatgtggtttaatgacgaatattcactaaattatattaccttaggtcctataagaatagaacaggcagtttattattcaggagcgacactgagattttcatctattacaggaaatcctaacatattatcatacatactattaatatcattagcgaccactctgattttgtttttaagacagtcaataaaaactttctattttataatatcatttttaattcaatgttatgccttgtttttaacatattcaagaacagggatattggcatttggaatcttcttatttctgttcttttggttaaataatagtaggggaatgaaccgtttaagaaaaaacatttggaaattcatgagaatatctttgattctaagtgtttttgcaggaggaataatagcccttttattacagggaagtaaccagcgattaagcttagatttggcaggaagaggaaaagcatgggatttattagccgatgttatttcaaaccatttctttttggggatagggttcaattctagtcaagagtttttaagagaaatgaatgttggagtaaatcatgcacatagtctatatttaggtattacagctgagataggggttatcggtttaggattatttctattttttgtctgttgtacattagggattttaattcaacagtttcaaaaatacaagaacaacttagagtataaaaatcagtggctcatgtattctggaaatattgcaataatagtagctattttattccatcagggtacagaattctctttattaagaaataattatctaaactttttatggtttttctttatatttactacaataaagttaggtagtgatttaattaaaagagagaacggaggagatcctgttgcaaaaaactttagtaataggggttaaagtagagaacatagaaaaagaaatgtctggtccacaaaaggtgttcaatagtattgttaatgatatagataatgaggatataattgttttaggaagggatataagagcatgtataaaagggatattttctagagatgtaagtaatttgcatatatttggttttacacgatcaaatgcattgttagttataatagggaaaatattaagaaagaatattctttataccgcaaatggcttagtatcgcgggaaaatttgcacttctctaatctgagaatttcttgtaaaatggcggaatttattactttgaagcttgcagatggtattatatgcgtgtcagaagggttaaaggaaatgattataagtgattataaaataccaaaaaagaaattgaaagttattccaaatggcgtttccgaaaaatttctgactataaagccagacaaaaatatttttaacgaacttattcctttagaaaaaagaaaaaagattatatttactgcttgcggaacttttaagtacaaaggaattgaacaattagttaaagttgtgaatgatataaaaagggatgattttatcttagtaatcgctgggccaaagggaaatgttcatgacaaggtaatgaatatgatggatcctaaaaaggttatatatataggtaatttaaatcaaagtgaattgataagtgcttattattattcaaatctttatatccaaaatagcttatatgaaacttttggcttagcaccattagaggcattagctgttggtacaccagttatagtaagtaaagatgttcagatgaattatttgcttaaaaatacaagattagaacactttattataaataatgacgaggagctgtctgaaaggattaatttaatattagataatcctaatattaaagaggatttaagtatcagtgctaagaaaatagctcaaaataatacttggcaggatatacgtcagcaatataaagaattatggagcgttattaattaagtgataaaagtatggtgagaaaattgggaaatgaatatttagttaatgttatagtacccacgttaggaaatagaattgagtatattaaacgcttatttaatagtttagaagagcaaactattaataatattaaagttattattgtgtctcaagaaaatcatgatagaattagcagtttattaatgaaatacaattttaattaccatcatgttatattaagcaaaaaagggttatctcatgcaagaaataaaggtttagaatatgtggataatggtattgttacgttctctgatgatgactgctggtatcctaaaaacgcatttgaaacggttgttgaaggatttaaatataggaatatcgacgcgctaagttttcagatatttgaccccgaaattcaacaatattataaagaatatccacaagctcctatagaaaaattaggtattcgcggggttttaaaaatttcatcaatagagttctttattaatttaaataaaattgatattggagatttgaagtttgatgagagatttggtcttggggcaaaatatccatctggtgaagaaaatatcttgctcgcagatttattgaaacagaaatatagtatagcttatgttaatcaaattattgtttttcataaaaagaaaacatcagaaaataaactaattgattctaatacttttacaggaaaaggaccattatttaaaaggatgagaggaactattccagctatatgtatgctaacaattttctttgtaaaaaaatttcatttaactgaaaaaccaattcgctcattcatcaaaagttttaaagagctgttaaaattttgatgaaaatatcaaagaaaatctgaaggagtagtattgaaatggaaataaatctaagtgagattgaaatagggaatcaatcacttgtgtcaattattatcccatcatataatgcaagttcttttattaaagaaacaatccaatctgtccaatctcaaacttatacaaattgggaaatgattattatagatgatgtttcaaaagataatacttgtgaattgataaaagaagagattaagaaagataatcgtatacgattaattgaattgcagaaaaattgtggagcagcaattgcgagaaacacgggcattaataatgcaagagggaagtatgtagcttttttagatagcgatgatctatggctacccgaaaaattagaaaaacaattgacttttatgcagaataatgatgtagctttttcgtttacgggttatcaaattatgaatcaagatggtacccttactgataaaattgtacatgtgccagaaaaaattaattataatggattattaaaaaatacaataattggttgtttaacggtgatgttggatattgagaagctagggaaagtacaaatgcctaacattaggacccgccaagatactgcaacatggttaaaaatattaagacaaggtcattatgcctatggcttagatgaggttttatcgaagtatagaaaagttgaaaactctatttctagtaaaaagttcaaaatggctaaaatgaattggaaattatatagggaaattgaagggttaagtatcctaaaatctgcatggtgctttataaattatgccctaaatggagttgtaaaacattttgttaaataagttttaaaagcctttttctttaaggggctttttttattgttaataaataaggaggataaaaaatgaatattgctattttcggaacaggttatgtagggctagtaacaggggtttgtttatcggatattggacatcgtgtaacttgtattgatattaatgagaataaagttgcgaaaatgaaagaaggtatttcaccaatatatgaacctggtttagatgagttgatgagtaaaaatattaatgataatagattgttatttacaaccgattgtcgccaagggattgaagaagcagatgttatttatatagcagtaggtacgccacaacaaacagatggttcggctaatttacaatatattgagcaagttgctttagatattgctaataatctaaaaaaagattcgattgtagtaattaaaagtacggtcccagttggtacaaatgatcatgttaaaaatttaattcagcaaaatttgaaagcagatgtgaaaatcaacatggtatcgaatccggaatttttaagagagggttctgcaattcatgatagtttctatggagatcgtatagttattggggctgatgatgctaaaactgctgatgttatggaagaagtgaataaaccttttaatgttcctgtttttaaaacaacaattagaagttcagaaatgattaaatatgcagcaaatgctttcttagctacaaaaattagctttattaatgaaattgctaatatttgcgaaaagttaggtgcggatgtagagcatgtagctaatggtatgggattagataaaaggattggtacacaatttttaaaagcaggtatcggatatgggggctcttgtttcccaaaagatacacatgctttaatacaaattgctggtaatgtcgagcatgattttgatctgttaaaatcagttattacagtaaataataatcagcaggcatcgctcgttgaaaaaataaaaaatgtattaggtgatatggaaggaaaacaagtggctatgcttggtttagcttttaaaccaaatactgatgatatgagagaagcggcatctattgttattgcaaatgatttagtaaaaatgggtgcgaaggtcgtagcttatgatccaattgctactgaaaatgcaaagaaagtattacctaatgaggttcaatatgtgccctctgttgcaggagcagttaaaaatgccgatgtaacacttattgtaactgaatgggatgatataaaagaattccctattgaacagtatatcaaattaatgaaacaacctattatttttgatggtcgtaattgccatggtttagaatatgtgaaaaagtttaatgtagactattattccgtaggaagaccagctgtagttcgtgaaaaagtttctttataattagtgggtaatttataggatgaaaatctgtaagactaatttttataaataaagaaattttttattaacctagctattttaaattctagctagattaatgtttacatgcttattataaggatatgtagtaatggggaggtttgttaattatggcagtacttgtaacaggtggagcaggatatattggtagtcatacatgtgtagaattactaaatagcggttacgaagttataatttggcacgcccttttttagaaaaacaccccctatttatataaaaaactccccttgacttctcatagttggtctttctcaactgatactaatggaacatagtttccattacacattaatgaatccccgccatctttacgcggcaaatctacaaattctcttgcctcatttggagtataaatagcattgtttacaccctttgataggccttccatctgtattgcgaaatcagcacgtaaaataccattcacattaaatttaaagcaatatccattttgaaattcatcactaagaagaagcttataactcatttcttcctcgtaatttttcaaaatatataaaagggtatctacgtaaaaagaacgctgttgcgtttcaacatttgcatagttacccttatcataattatttacttgtgcaggtttaataccaaatgccccagcaacctgtagtgctgtatatttgttaatctctaagaattgagcatctgccatgttcacatttaatggagtgagttgaaaacctaatggtagcgggacaattcttcctgcatttttcaaaccattactaaattcttcaatttttgctaccattttctttgctttgtcatgatccaaatcaccagtatactggacaactgcctttcccattaaaccatttgaaaaatagttattgagatataaagctccactttgtatgttctcaattgataccttcaatatgtcttttactgctaaaccagatataccatctaaagataatgaagttttaaaatgcataacctgatcatatcgaaacctatattgtttaccagatttattatctccccatatataccaaatcgcattttccctttggaatatacctgcattatcaatccaaatctgtacgtgttcgctaggaagaatccacaaatcttttactttatccctctccgtattaacatagacatacgcattcccataatgatttttatttgcttctactgtagaccaaaatgtacttgaagtcatatatggattaggccgcatttttaaaagtgtatacaaattatgatctgttgctttttcaagaccgttatttgtatctctatataattttaaaggtaatttcccaatactttcagataaaagccttaaacaggtaaaatatgtgatttcacttaatttatttttatttacactacctatatcaatacctaacatctttaaaaactcgtccgaatcaagtgatactgagttttgaaccttcttaggttttaatttattgagccattcccacattcactcacctcctttaccaaccaagtttatctagattttcatccgtaacatattggcttaatttcaatcctacttctcccttcattgccatcttatatgcatcaataaccgcatcaattggatcaattcttttctcttttaagtgtttatcgatcttgatttcaccgaaactattggatactgtctttgcgttggctatactccatgttaacaatttatttttacgattatattgaatgtttttagcctcaacctctagtctaaaatcgactgtagcatcatttaaattctttgctgattggacaatcatgatgctgttatatccaagctcttcaagatcattcaaaaaggcatctgcattgtggggatcgtatgctattatatttacaattaactcgtactcttctacaattctttttatataagcgattatatatttataatctgttttaataccccctaatgtctctgtaacagttaataacccatctctaatccagatgtcataaggagctttatcagtctctatatgttcttttacacgatttttaggaataaaactatgagaatgtacgaaataatttttcacttcttcttttaaatatgggaatactgcccctaaactcgttaaatcaccaccgctagataaatccagacctaaataacactctttccctctaaaatcctctaaatctaaatctgaagcacattttttccaatgttccatgttcatatattgattgtctgtgaattgtacccaaatatttaagtgctttgtaaggaaattgcgaagttcacttccgcccctacgttttgctgcacttgccatagttaaaagtgtttctattccttcttgatctcttgctactaaaggattagcttttatccaattacttgaatcccaaatatcatcatctttatctaattgagcaatatatacaaactgtttatcgtcttcatatacaccttcaagaagtctacaacaatcttcatacaactcgtagcaaggactgtttaaatcaaatcctgctgttgtgataactgatattaagcattcttttaatttagttgttccaccctccaataatttatacatttgatttgtagggtgtttatggtattcatccacaatgccaaggtaagcgcgaaatccatctatactctccgtatctcttcccagagcacggacaactccatttgttacaagtgcttcaatggtatttttatattctttcaccttgaaacactcacttaaatcttcatctgtttcaatgaacttaatcatttctttgagaactatgtttgcttgatcctgttttgtagctgtacagtatacttgcgcataattatagccatcaaaattgctataatatgtccctaatacaccattcatcatagatttaccattttgtctgcccacttgaacataactacttctaaatctacgataacccgtttctttatggacccaaccatgtaatgatccaaaaataaatgcttggaatgatgctaaagtaagtggttctacttcttctccttcacctatcattaaagtttcagcatactcaagtaaccgatctgccttttcctcatcaaaataatagacgaacggcgccaacttacttttttccaaatcatctaagtgcctttggcaagctaacttaacgtacttccctgcaatttctcgaccttctaatacatcaagagcatactgtgtgaccctattcatacaacttacctacataaacttattaaatttattttgaggtttttcatcgttctgttttggaactactaatctgcatcttgatgtaattgttaaacctaaatcgctggaagcttgtctacattgtttaaaaagtttgtcttgatttataagtaagtctgaatacacgccgttagatacggtatacctattctcagatatgatgttaccttcctgatccttttttacatccaccacttcttctaacggactaagctcaagcatagcatttgtaatttctacatacattttccttgctattaaaaatcttgctaaagcatcaacatcaagattggacatgatttcaattctgattagctcatcggatatttttttaaagtctcttctcaaatcttttggtaaataagaaggcgccctaatcttatcactaggcgccttgatttcttttgatttacgatttgcaatttcagcttttgttaaatgtttttttcctttgagtacaactaaatccacaggttctctcggtctagccatccaccttcctcctttcggaattttcatttagggagttttcgcgaaaaaaaagaccacccggcgactcgtcgccctccttgaaaagtttttgatatccccctaccctatcaaacttcttaacttcttctgtatattgaacttctctgtcctaacgtcatacagcttatggactttctggtggcatttctcacacaatgaaatcaaattacttcttactaaagctaatcgattattttcttctaaaggaataatatgatgtactgtgttcattggtttaaccttgttctcactccaacatagttgacacaacccattgtctctatcctttacccttgctctagttactcgccaaggctttgagttatagaacttctggttgtccgtatccgttcgcttcgccttgtaatctctgtgcctttgtttccttctttcttcagtaacaacagcacactcctcgcacataccttgttccatcggtactgtcttaccacacttacatatcttcagtaacatgattactatccacaatcaatccatttataatatgatcgataaggttgttgtagtggaagtgtttatattcactaaattcgagacttgttacacctgacaattcatgtttacctttaaccacagtgtaccttacaaatactgtttctatctgactaaaaaccttcgtggaattgtttgtaagtacatctattgtttcaaagccaatgttgttaattactactttcatccttatctcactcctcttaatctcgatttatcaatcacccatgtcttacctatcttctttgcaacaatctttccttcagcgcataagttcttaacatgaccagatgatacattgagaatagatgcagcttcatttacaccgattacattgtgtaagaatgtattcacctcctcactccttatatttgtttttataaaacacaccagcaatcttcatggttactaacgctggccaaacaggtgtgaagattccaatgactaagagcattactacaatagtaattgcttcttgtttagtatcaccctcttcttcttttaacatcttacgtaaagctggttgcataccaaaagaaacatatatcatacctacaattaaataacctaataaccacaacatcatatattcttccgcattttatctgccatattgttagacactaccttctgagcaatagatagatagcaagacgtacatatctttctttcttcaccataacgaaggtctttgataatatggatagctttatctttatgacaccattcgcattcataatgatcctgtaactctttctccttagcaagtgcaatctgagatttcccagacggttcaaccttagtaatagcttcagctatttgctttccatttagaaagagaggaacttctatttcaatcgaatcattattattagtaaacctaccaataaccttttccaacttctctaatgcggccacacattcattagcaacttcagttacttccttcatttgttttaacgcttcagatgtattagtttcagtatctatattaatctttaatttattattagccatctacaattccctccgcggctttctttaatcgctctatcttttcttgcgcatctttgggaagatcgttcattttagcgcttaattccttttttaaatgatcaatcgtgttgattacaccttcaattctcatagataattcgttaatcactttttgttgatctcgattcacactatctaaatcattaactgttttttctaattgattgattctttccgcaagatattgattatccatccctcatcctcctccaaaataaaaagcacccgaatggatgctttgttatcatttattgatttgcattttgattacggtatgtgaagttttattcttctttcagctaacaaccacgacagacaccatcggaaaacttatcaggttatcctaattctgtctacctaggatgttgttagctcaaagaagagcaaaagctctccttaataatggtatcattcaatcgttaccatctgctggtttcggatttaatttgctaccattacggaatcgtttaaacaacatataaattataaaggaatctttatgagttgtgttttccgccacttctcacaatacaaatatatcacgtaaattccaaaacaaccggcacatttcctgccaaaaagcggtcacgactctgccacttatttttccctatcaatatcctgacctactctttgcaactgttttacccaaatcagtagtttttggcaactacttactcctcctgtttttcctctaatgacttacccatatcttgtattgtgtgtaactgaccccttcgccaaaccccttgatatcattgattttgtttcactttctcttttgagttacacagtacgaaatttatgagtaactgtatagatttaaaaagaaaagcaatgcttagattttaaatctagtcattgctttatccattgcatcttggtttacacctatataacgtaacgtgaccttctctgacgagtgattgaatatctccataagtaatgctatgtttttcgtttgcatgtacatatgatacccgtacgtctttctcagtgtatgtgttcctatttcatctagcccaaactctgccgctgctccgcttaatatcttatatgccatactacgaccaattggacgatttttaccttgtctactttgcaataaatactcattatcttctctttcttcaataaaccatttaagttctcttttcaatgctgcagtaatttgtattcgtttctgtttccctgttttcttttctctcatagatatatgactacctttgacatctcctaccttcaatttcaaaatgtccgagattctcaggcctgtattaattcccataatgaagagaatgtaattacgtaagctcttttccttaaaataatcttttagctgctgtatttgctccggatcacgtatcggttgaacaaaattcattattcattacctcccgtttcttctgtctcgtaaacttctaatccaagtgcaaaagcaagcttataaaatgctttagacttccaacggcgataagtacgctctgacatccctatttcgttataaaccatgtaatcacatacgtcctcttcttctaaataacgtttataaataatatctctttgtatacttcctgcacgtccgtttcctaatcgatttagaaactgatcaatacgtactgacattctttcaagccactcttctcgtttactttgttgaatatttgctatagcaacatcttctaatggttttccaactgtatgtgtaggaccatgctcacgtacttcataagaaggagtgactttcatttctttacgcatcatcccaaattgtctatgtatacgtacgctttccaacacaccttctaattcctcttgtgtcgctgttctatcaatttttggtaagaaagataattgtttagtcatgtaagaccactcctttttatttttagattacttttgtcttattgctccacgtcttcgttcataacaaggtctatgcatgcccattaaatcttcaatatcacgagtgctaaatttctcttttcgttttttcttctttttcttctttgctttatttgtttgctttttccattcacgcaattgatctcttaaccccttcatttccccatctcccttttcaaaataaagaggacacctattcctaaaacagctttaattactgctttaatgaattggtgtcctctagttttctagccggactatattctgtttgctttactttaaaaggattattttattaagttttgattgtcatatacatttcctattacttcgaatgacactgcactcattctcaaatcttcatcctcatctccatctggatctttgtagtaaaacatagcgtccttttcgtgccaatcaactctgtagactaaatcgttatgacatttgacaatatcaccttcgtaaattgccttgccgttcttatcttctacgcctgtatattgaccaactgtttcagcttcaactcgaacatcaccctctaattggctttggactataaatggaactgactcccaaagacctagcatgccatcaaacatataaccatcaacataataaccataatgccacttccctctttcatctcttccacgacatttaatttttctcattttcttgttcctcccctgaataaaactcaatattccgtcaatactgtagacaacccattaagttactttctccttgttcccccttggagatgagcagttagcttttgctagctgctcttttatgttagtgacgaatcaattagtaatgttgtattcttacgctcattaaattcttttgttatttcttcaatcgttaaatatcctgctactgaaattgacgattcaatatatctgtttaatgcttgctctcttgttatttctgtaggttctccctcttcttctatttccttaatgctttctccagcaacttcttctacataaacctcgatagctttatcttcatcctctgctgcaaccattgcccaatatccatgtttatcaaactcaaagtatttcatatcaattccccctctttaataggcttcatgctcttgattatttcttttacatgttgcactaactcttcacgatccatttttgtgtaaccttttattttgttatgtctacaaactgatttaagttgttttaacggccacttttctactggtggaatactaacgattacagtttggtcattcatacctatatccatatccattctccttttctacaaaatgaaatttttgttcagttttctttaacttcaatttcctctgctacatcttctagtacgctagctagataataagcatcatctacataatctgtatggatcgtaaatgtattagcttttgtaacaatcgttactttaccttttctcattctttcttcattaaatcccgtttcattaaccgtaatttccatctttcattctccttttctactaaaatgaagtttttattcgatttctgcacttataccatcttcgcttagaaactcacataatatttctaagtctccactcgctacaaccatttcccatgcttcaccttcaaatccatactcctctgaaagaacatttacagcatgttcaaaattcgtaaaactaagttctccgtaatttataaccaaacttcgaacgttatccggttcttccgtttgttccagttttagctcatcgatagttatgtctttttcaactagcacctcttcttcgacatatccatcacgaacgcgatcagctgcttgttctaatgtttccgcttctacaattccctcatacaccttagtttccgtatacgttacagtaaatgttttcatcattcattctccttttctaataaaatagcgtttttgttcagtttttatctttttccaactgttctttcgctctattaactacccacttcaactcctgttcatttagattcttacaatgaacattatctctatagttatctgttatttccccgctttgcatatcaaaagacaaccaaattgcagcaatttctaatcccatttcatagtagcctatgattattcacctctaaccaaattacgattttatgaaaaagcttgcttaattctggcatcaataaaattccgatcattaccccagcaataagcttcatagcatttaatttcttctaataaacactctaattcctcaacacgaccaattaccttatcaagcaattgcatcatatctaattcatttgttaactcttcttgaagtgctttccatttactcctttggcgaaaatgaatattccatgcttgctgcggagtaaatcccatacccattaattcctttactatatctggtagctcggattcaaaactgaaacttgttttttgcgggatttctacactatgcttgctttcgaacttaaaattaaactcaacaccctttacttccgccactttcatcggcttaccatctttttcgatgaaaaaaatagcatctttaatatctgtaagtgtatgatccatattgttttatcctttcaaataacgaatttatttggtctcttcacatttacaatcgtgtaaccactcatcacacttcctgcattcacactcacagttttctaatttctcatcacatctagagcaataatctatgacttcataaatcacttgtttccctccttactaagttccttaatagtccgaatcatccaagcaaaactgttcgcttcaactactatgctcttcccttgtactaaactagcgtcacatatcaggtgtagtttttcgattgttgtcatttccttttgctcaattactttctcccagcccattttgtctccccctatcaaataaagattttgttatatttcaccttcgtgcttttttataatgtttagaacttcctctgcatacggctcgtcttgattaaccacataatatttaggttgtgggttacgcccttgtttctccctttcgcactctatctttcgtgaaatcccctctaaaatatccctttcgttcgcggatgtcatttttaaaatatcatcgaattttaaaactaaaaatttcacttattgccacctccttttcgattaattaagaaattttgtttaaactaatgttccatcaattaacaacggaaggttttcgcattgatcaaacattttaatccattctgaaatatcatccctacccattacatctaaatactttgatagtgcctgttcacgcgtgatctctactggtaaaccttcttcctctacttccttgatgctttccccagctacaatttcaacatatagctcgattgctttttcttccccaccatctttaactgccatcaaagcgtaataatcatgtttatcaaactcaaaatatctcattattattttcccctctcgtttaaaataagaattttgttataaattaacgattaactacttcgatattaactatctggccaaatgtaggatattccttaatttcttttagccattcgctgatttttgaatctaactttttctgaagtaggtctatttcatcttggctaggtttagataaccagctttctgaaacttctccacatgcctcatacgcatttacagtaacttgatcaataacatcttctgcactaacatatggcacataatcacttatctgtccgattgaaaagttatctccataaggaactccatcatatttttcaagttcattcatttcttccttcgctgcctcaatcgcctcttctttagtagcaaagcgatcacttgtccaaatttcattgccagtaaggttgtacatccattccatctctcattctccctttcgtgttaaaataactattttgtactaattgactcccaatcaaatgtttctaatatattcaacaatcgttccacttttggcgcccgccatgccgtcatagcgtatgtgtggaccttgcttgtgtaatgatgtttgtttaactctatgtgcttcttagcttccgctttagttaagaacatcgtattttcaacaatgaatgcttcttccttttcgtatactaaatggcaatcttcatcgatgttttctttaatccactcaactaggtcgtattcagaagcgtattcttgcaattcttttaagtcttcaatctgttcttcagtaagttcatgttcaatttcatcgttaataatttcttttacgtattcatcgacaattacagcttcacaatcgttaacaaagtataatgatgttctttcgtggtacccttctgcagttacaacccatttataatccattaaagtccaaaagcgtggtgatgcttggcaatcgatttcctgtgtttttaattcctgctgcaattcctttaaaaattgaatgtccttattcatttcccgattcccccagtttttttattccatcgtttacacttttcaattgctcttcgaacatttttatcatcgatcttctcatgcgttcggtattagtaggatataaaacgtgatcttctatatcctcgattttatcttccaatctctttttctctttatttaacgtgtatagagcgtgattgtatgccatatctatccaccttttcgattaaaataatgctttggttaaagctttataggattgtttcttttgataggtttagtcgaatatgtaatctcaacttctcttgaatactcaatttcagaaccgcacatactacaatcaattttgtcattgtcttgcgaacgctcccaggcatctacatccttctcgccacaataagggcatgttaaatgttcttcatattcgacatcttctggtttagactgtaattgtatttctctaacaccgatcaaattattttttgggtattttgcgcaaacgtgataaactttaccatctatcataatgttagtgcttatcgccaaatcacaatctactacttttataacttccgcttctttattctcatcgaaccatagttccatatcgtatttaacgattgtgtatgccatctctaattccccttttcgattaaaataacgcttttgtttgattctcatccgcccatattaggattgatgcattcccacatataattatcaaattcaatctctacgttcttaataatctcgcctttatgaatctcaacatcttggttgaattccatccctttctcaaacgcataaatttttatatccacgttgtactctttagacaaggttgctaatggtgctgcatctatgccccaagccgccttataatcttccagtacgcatatttctaatttatcttcatcatcttcaaaataatgttgaatgttactctctataaaattccgacgtgttcctttaatatgaaaagcattttctgacttgatgaagatttcatactcatcttcctctacgatcttttccacaggcgtttgttcaaagaatccgtttggaataggagttagtgcttccaataaaaactttctaacatcctcttttgctcctctaactttaaaagtaccttcacaccaatttggcatatctctcattctccttttctaataaaattcaaattttgtcttaatatccgttatcctggcgctggtggttcacttcattctttttgtaataaccttgttcaatttcttcaaatgtgaatcctaatttcttacctaaccctaaaaacgagtacaataattcttcataaagctcaatatcttgagttgcacgaaattccgatataccttcatatacattgttaaattgattgactaacgtacttgccgtatagacgtttgcattatgttctaataatttcaggctatattcattaggattaaatccgatgccattccctagtgaagctataaaatgaaatccatctacatactccattaaaataacttctttttcactaggtcctttattgctccaatgcttaaagcatcttgtttcatttgcaagttctccaatttccacctgtaaagcaaggatcatattgtaaaataaattttgtccttccaatccatgctccttaatgattcttgtatctaataccttttgcattccgaatattttagttaagttcattttgatttccccttcctatttagcaaattcctaatcctatcggacgatttgttattaattcctgatcagcttggtctatcacaaggagcgcaacctccgcttggtgcctccttaacgcttttgccatctttggcaagctcataccttgtttccacatttcacgaaaacgaattacatctctttcatcccaaataaagttagcttcctctaaagcgatgtaaatttttaatcttgattccttcatcgcttcatgattacttgctacgctcataagcgaacctactttctaaaaatgattattttatcttttcagtaaacttagtatccactcgatccactttaccgttaacccatactgcgacttgctcaccaaatccactgattggcgggttaactgccgtaacattcccgtccttgactatataaagtttgttgctgctaacatcaatttctatttttttcatatgtccctctcccttttactaccgcatgtactcgacaacatcaggtttgaatccacttcctaagtaaatccttaccggaattatttcttttttatcccttgctgccttacacaattcttcagccgtatcccaattgaaaaacttatctacagccctttgaaatctccaaattgccattacatattgttcaaagatgtcataacgatcatcttgtttagttgtgcgtggtaattcatccgtaccctttgcatttcttggaacttggacgcgtacatcagcgtatgtattgcgtccagttcctttcttaacattggccttcattacatcgaactgacaaatttccggttctacatcgaaaatatttaattgtttaggcatttacaatcccactcttctcaatagcgcccagcaactcacttgcaccttccttacttaaaaacatccgaccctctagcaactctatgtttgattcagaaacttcacccgttacaaagcatgacttatcctgtttttttaaaacgatgttttccccttcaacatgaaatcctaatgctgtaccttcaacaattcctaaatttctgcgtaactctactggaattaccacacgccctagctcgtccacttttcttgaaacacctgtgtttttcataactttctccccctttttagctaactttttgttgttgattccgtttcaactcttgtttcattgattcaaatttgattaaccatgcttgccaacgcttatcgttttcttcttgctgctgctttgctacctcacagttacacccttccgttagagctacacctggataaatttctttacgaataattcctttatcacgacataatacacacatgcttattcctcctttttgaagtttcgcaaactgtaattttcaccgttcattttcaacacttgagtatcttccataatccgactaaactcacgctctccgtacattcctgctaactccataactccaaagtttgttgtaaataagtttgttctgcctagcctacgctctagaatgtccttggttttcgttttcttccaagtaactccctcagcatctttttccgtaaactcggctccaaaatcatctaatacaagtacatccacatttgcgagaatagacattagcttgtcctctgttaactcgctatttttattccaggtagatgttatttttgtgaagagagcgttcatttctataaacattgcgctatagccttttctcataatttcttttgtagccgctacacataaatgactctttccaactctatagtcacccgtaattacaatgctttctgacttgttaggttcaaagtttctagcaaaatccatcattacttctttagcatttgctaattcctgtgtaggtggtgcgtaactatcaaatgttgcttttttcaatttaggattaataaggctgttatctgaaaacgaatcgtataaatgaataatttcgtttttctttttaatagccaatgtttcttttgcaagttgctggtcctcttgctctaccgatctacattgtggacaaaactcttcatttgtttttgtatctataagtaagcgtttattacaaacgtctttaattttgtctttaccgaccaagaaaacatttgtacatctattaggagacaacacataactttgagcaaatttactcaaaatcgtatttttcgatgaagctactgtttttcctaacgcttgcattgtttttctctccttttttacctttgtttttaaactctatttctgctgcattaacatcagctaaagtacgaatgtttttattaacccactgttttaaaatgccctcagcataattccatttcttctgctgtttcaaagcacgctccatagctgcttgtacaagttcttcgcttgtatcgtttacccattgtgaaatactttcggctatgaatgaatttaaaatgccgaaattattttcgtaaaaagagaagatgctactactactttgtatattagtattttgtttattagtacttagtaaattattagtacttagtagtgtttgattttctatatatggattctccacatgtggaatgtccatttgtggattttctacatatgggttttcctcttgtggcacttcataaacgattgtttcccatttaataatttttcctttttcatcttttacagggaacctttttacataaccgtactttttaagttccttcattcctgaatataagctactaattttatccttcgcgtgtgtcgctatttcttccatgtaaaatacccactcatctggtaatgataaaatataagccaatattcctttcgctttccaacttaaacgttcgtcacgaagacctgtattattaatggttgtgtaatttttacttttattaactcgaaacgttgccatttatttacctcctcgtacaaactgccacatatgcttgcccacttttgataattcgttgaatttcataatgcggataaccaaccttgaaatactgatcaatcatcttctttaattgatcttgactatctgctaagtcccaaaacttattaggtaatagcacttgatattcgattgaattcatatactatttccctactttccgtggtatacttataacaacttgtttttcttaaaggacccactgctatgggtctttttattttgttctacatcactccaagcccaacgttttatcggctcgtaagtaatgtaaagcgaccacgcactgcatgcgataaacattgcgaataaagctagcgatgttgtatcttccatcatgctgacacccccttttctatccaattaaagaatgcatccctgggaactactttctttctcccaattttcactaaaggaaaacccttttgatccataatgccgtaagctgttcttttcgctactcctaatatttcttctacgtgttttacgtttaacataagcggataatcgttcgcgctatcattagtgactggaatgctatctaacttttctacagttgtttgtctttcatcttctttattgaagcgaagtaactcaatagcctcccaaaattcttcatccctccatcccttttgggctgaaaactttgtaagtgataatgctatttgaactgttgaatttctcatgattcttcatcctctccctctttgtcgtcattttgacgactttcattcaaaaaaatttcttcaatagttacgcctagactttcagctaatttgggtattttatcggcgtttagtttacgctgaccattttcgatataagaaatagctgaagaaccgctaaagccaagcattcttgctaattctccttgagttattttcttttctttacgtatatgacgtattctcatgcctatagacaaatgtttcacctccaagtcgtcgttttgacgatttgttattttcattatatgtcgtcattctgaagaagtaaacatgttttttgtcattttgttatattttttttatcaaattgataaaaaacagtgtaaagtcgtcagaaagtatatatactgtaattaacaacaattcgaatgtaatgtaactcacacatagaaatttatttataaaggggaataaatttatgactctaggagaaagattgagagcctgtcgtgaaaaaagcggctatacacaaacgtatataactgaaaaactagaaatacaccgtgggactctttctagttacgaatccgggagacgaaaaccagattatgatactttatctaaactagctgatatttataaagtatctgtagattttctattaggaagatccactgacgaaagattaaccgcagaacaggataaacaagcaaccgcaatggggaaaaagattgaacaactgatctctaaattatcagaagaagaacagaaaaaagcttgggaacaattagaaatgtatgtacaatatcaacaaaacaaagaacaaaaataaaaaaagctaacctctgtggttagtctttttttattttaaataaaccgtctagtaagtgttctaattgttcctcagtattgggagtgtttccctctaataacaacttaattgccgcttcttttgctacttgctcttttaccattataatttccccctacaccctctgtatattttgtttgtaatttaataatttttagagtttctctttatagcaaattataataaccgttagttctttataaaaatgacgtttggaaaaaaataggtgtcggtttttttgccgtcaataaaaaacctacagtccctaaaaagtacgaaagacgctgcgatttacgcaacgtctcttttttcattgttattttaatttttaagaaccacctggttcaaccatcatatattgtacttcatgtttagataattggcttttactatcctttgttgctccactaacatttaaagttaaagtcattacagtcagaatagataatactaccatactagcttttttcatattcatcccactctttcaactatactagctaacgttcgtctcaccgcgttagcataatgataattaccaacacgctcaaaacgtctcaaagattcccttaatcccagtatatcattgttaattctggaaatatagtacattgtgaatggagaatccatttttctttctgcagctaactgtttaaatatttttaatgctttatttttgtcgccatataatccttcgaaatatcctatttcagatgtatcaaggtattcaaattttattttatcaagattaaatccattatctatataaagaaaggctaaagtagattggaatgatttatattttcgactttctcttcctatgccattgtcctctaaatactttatgcaatccaataaatacttttctgattttaatacatccaagaacatataactttctcccatacagcacaatgcagttgctttggttattgggacttccatttcgttatctaatattttacggcatttctctctacatatttctaatttatcatcaaataaattcacataggccatacgttcattaaaatacatactaagccaatttcttataaatccatccttaatctctactaaatttttctctaccttatctaaatatggattcattgcccttatattaaaaatatcatgcatcgacaatgcatacagaatattaataactacttggcattctggatcattgggaaatacctttttattaatctcatccaataaaggctgtccacgttttttatcctgatttcttttattaaacaatttgtacgctttcaaatatttatttaacaacttacaattactatgtttattaactaaataatctattacttcatattctccagttccttggcaataacacaaagccttcctaacgtttagattctttttacatagtgtaataaattgtctgattatcttatttctttctttaacatctctgtatatttcagataccacacacaaaaaattctcgaatttcatttctgctgtttttccagtgatcgcatcatttatcactacacgatctactccggtttttctttctaagtcaggaaacgttaattcttctttttttattcgctcctttattagtttcattaaactcttcactagaaacacttccttttcccgaacacggacaccacctaacaattcaaaaaagttggaaacaaaatacgagaagagaatatttattttttatgttatacttagttgtgactcgtatgtagcaaagtgtttcctaagtactggttagggaacggttcaagagaacgtttagcagacacctcttgaacacgctcatatgggtcttttttcgttcatttttagttacttccatactatcacgaattttaaaaattttaataaaataattgttaatcaaatgttgagaaagtttttttatcgctataaatcaagatttagttacatatgcaatttttcatatcgttatttttatactttatagatataataccacaaaaagcgaacctttgttctgtttttttcacaataagagattgaattattatcaacaatgacaatttgagtaagaaagctatttattctcttttttatttgttcattcgacataatatgacaagttattaatattttgtttgctatgctaacttcagaaatcttacattttatatttttggaggattaagaatgaaaatttctaataaaatgtttattttaattagtatagggataataatcctactctttattagaggactctataatagcattaagcttggagactcagaatttggaataggatatgtttttggacaagctgtaggaggaactttagcctggttcagtattattgcgcttatagctgcattagtttttctaattataggattcattaataagaagaaaaacaatgagacaaaaccattattcgtaagatctgcaatatctttcggaacatctattgtttcttttgtagtgctattcgtaattatttttattacaatggggatcgaaaatgatcataaggccgttgctctggaacagaaaaaagaaagcgaatatctaatggcagccgcgaatttttataacgacatcgattcttttgaatggttctcaacaactgtgttatcaggctattcaactacatggtctgaggcaattaacaatagaaaagattttaatgtggagataatatcaaaaaaaacagagtctgataaaatgattaaacatgctgaactattgtactcagagatgggacaacaactgaaagttatctctaaagctgcaaaagaacaacctgaacaatataaggaactttacgatgaatataaaaagatatatagcatcgtaacggcacttaatgagcaagtgaactctccaactggtagtttaatctcatttaatcaaaatgttaattctttactacaggaatacaaaaaagcaaaagggaatattgatattgccattactgaagatataaaaaacaaatctgagcaaattaaagaagcgaacaatagtacatcaaatgataatgatttaacaaaatactgattttgtaccaataaaaaaagcccacaaattatgtgggctcagaagtatggatacatatattttaccacatagacactcgaatgggtgtctatttcctttttctaatactggaattatttgtgctattcgaatactattagttcaaggaggtatggataatgaaaggatattttagaaaacgcggtgaaaaatggtcatttacaattgatattggaagagatcctcttactggaaaaagaaaacaaaaaacagtatcaggctttaaaacaaagaaagaagccgaaagagcatgtaatgaacttattcatcagtttaatactgggagtctagttgatgataaaaatcttactctcagtgaatatttacaggagtggcttgaaaacacagctaagcaacgagtgagagattctacattcattaattatagaagagctgtgaacagtaggattattcctgtagttggttcgcataaactgaaagatttaaaacctctacatggacaaagatttgttaaatcgctaatcgatgacgaattatctcctaaatatattgagtatatttttatcgttttaaaaggtgcattagaagatgctgttaaatgggaacttttatataaaaatccgtttgaacatgtagaaatccctcgcccacgaaaagtggtcaataatacgtggtcaattgaggagacgaaaaccttcttaacatacgctaaatttgacaatcctatttactatcatttatttttacttgcgcttaataccggtatgcgtagaggtgaattgctaggcttaaagtggaaaaatgtagatttagttgaaggtaaggttagtgtgactgaaactctaatttacgatgaattaggatttcgatatacagaaccgaaaacatcgggttctaaacgcttaatttccattgatcaaagcttatgtaaagagttaaaaagttataaagcaaaacaaaatgaatttaaattagctatcggtaaagcttatgaagataatgacttagttttcagtagagaagatggtagaccaatctatccaagaacattaactactgtctttgaaaggtttataaaaacagcacaagtgcctaaaattagattccatgacttacgacatactcatgccacacttcttcttaaattaggtattaatccgaaaatcgtaagtgaacgattaggacataattccattaagaccacattggacacctatagtcatgttacattagatatgcaagaaagtgccactatagcgctaagtgaggcgttaaaatcataaaaaaattgttgatgtggtcattttgtggtcaaccccatcaacaattaatatcaaacccctatatttcaagctttaaccaagccacacactccacatgagtcgtatgcgggaacatatcaacaggttgtacttcctgtgttttatatccaccttcttctagtacttttaaatcacgtgctaatgttgctgggttacatgatacgtatacgacgcgttttggcttcatgtcgatgattgtgtttagtaatgcttcgtcacagcctttacgcggtgggtctacgaccattgtgtcagcaattacgccttctttgtaccattttggaatgactacttctgcttctcctaccccaaattcagcgtttgtcatgttgtttagtgctgcatttcggtttgcgtcttcaattgcttctgggacgatttcaacaccgtacacttttttcgctttttgcgctaggaataacgagattgatccgattccgcaataggcatcaattactgtttcgttaccgcttaattttgcgtattctaacgttttatcgtatagcactttcgtttgttctgggtttacttgatagaatgaacgtgctgaaatcgcaaatttaatgtccccgataaagtcataaatatattctgatccgtatagtactgtcgttttgtctccgaaaattacgtttgtacgcttcgtatttacgttttgaacgattgattttacttctgggaatttcgctgcaatttcttcaatgattgcttttttgttcggtaattctgctgtacgtgtaatgaagacaagcataatttcccctgttacttgtccgtaacgagccattacgtgacgaagtgttcctttattacgctcttcgttgtatgcagtgataccgtgcttttcacaaatacgttttacttcttggattaatgtatcgttttcttctgcctgaattaagcatgattccatattaatgatgtcatgcgttccttggcgatagaaaccagctacaagtccgccttcacgttctccgattggtacttgtgctttattgcgatatacccacggatttttcatgccaagtacaggatgaacaggaacatcacctagtcctccaatgcgctgcataacgtcacgtacttgtttttctttcgcctgtaattgtccttcataagttaagtgctgaagctgacaaccgccgcactgattatatactgggcattctgcatctttacgatatggactttctgtatgaagcttcattaaacgaccaaatgcgaagtttttcttcactttaataattttaatttgcgcttcttcacctggtaatccgtttttaacgaaaataggatagccctttactttcgcaacaccggcaccatcatgtgttaaatcttcaaatactacatctataaactcgtttttctcaactggtggcgtcattttagtactcattttccgacctctctttttcataacactgcgttacattttatcatacttatatggtctttttctattggaagaaaaaaagctattgacgatagttctctgttaatgttacgctactactaatttaatacggacgatgttacctcatatatacttgataatatggatcgagagtttctacccagcaaccttaaattgctggactatggggaaaactaatgaatattagcctatgcgcaaaaaaggactcatattgattagctttctctcatagatgaaagtgaatccatatgggtctttttttatttttatttttctaaaaggtcagacatcttacgtatgacataaaacctcattcctttatttttagtaatataacgagcgttttatgtacaaactttatacgaacttctgaaaggggcaactacatgcaatatgtaatgagcattatcggtattcttgccgtgttaggtttatgttttgctttgtcaaacaacaaaagtaaaatcaacttccgtgcaattgcaattatgattggtttccaaattttaatcggttggtttatgtttgctacaaagattggtcaacaaatcattattttcattagtaaagttttcaacaaactaattaaacttggtacgacaggtgtcgattttctctttaatggaattcacagagattttgtctttttcttaaacgtattactaattatcgtatttttctcagcactactttcaatctttagttatttaggtgttttaccattcatcgttcgcgttgtcggcggtgctatttcaaaaattactggtttaccacgcgttgagtcattccacgcagtaaactctgtattcttcggttcaagtgaagcattaatcgttattaaaaacgatttacagcatttcaataaaaaccgtatgtttatcatttgttgttctgcgatgagctccgtttctgcttctgttacagcatcatacgtaatgatgttagatgcaaaatacgtactagcagctcttccgctaaatttattctcaagcttaatcgtttgttcgttattaacaccagttgatacgaagaaagaagatgaagtgattcaaaaatttgatagaacgctattcggggacagctttatcggtgcaatgattaacggtgcgcttgatggtttaaaagtagctggtatcgttgccgcattaatgatcgcctttatcggtgtgatggaagttgtaaactacgtaattagtgcagcttcaggcgcaatgggacatgccattactttacaacaaatcttcggttacgtactttctccattcgcattcttaatgggtattccaactcaagatattatcccagctggtggtattatgggtacgaagattgttttaaatgagtttgtagcaatccttgatttaaaagacacagctacaacattagctccacgtacagttggaatcgttacagtattcttaattagcttcgcaagtattagccaaattggtgcaatcgttggtacaatccgtgccctttctgaaaaacaaggaagcgttgtttctaaatttggttggaaaatgctatttgcatcaacacttgcttctattttatctgcgacaatcgctggattgtttatttaataaaaaatcaccttactttaacgagtaaggtgatttttttgattctttatgaaaccgagtgaaattcaactgcttcttctgtattgataatcctatctttatatataccttttattgaaatgtaaatgatagatttgtttatgttttttaactttcctaatgaaaaatgataaagcaatccattactttttaaagtccacatcttcccactccatggaccagtagctttttgttcatccgacgccttgatttcaccttcatattcgcattctcccaaaggagttttaattgtattcttctctgtatcaattcgaatatttttaattagattcaaattttcatcagagagaatttgaatttcatgatctttctttttaaaaaagagttttccgtctttggtatttatatattctgcattatccattttatctatcataaaatcatattcttcttttgtaatacctaagttttgatgataaggaaacgtttttttcggtataatttcttcttcggcatacttcaaataccaatctaaattatttgtaatactatcgctcattttatttccgattttctctaatttctcttttatctcataaggaaattcaagtgtcataatatccgccgtcacttccgcattcataagatgcgatggaatatactcttccacactatttgctttactcacttcactttgacaaccaactataaatagcgatatgaaaaagatatatattatttttttatatttcatttctattctccactccatacattattcttacttagttttatagcggttttcattatagtataaaatctttatattttaataaaatacatatccttatgcaaaattgcatattaataagtcttcttcttactttaaaattagcttaaattactttccaaattatacaaataacaagcattaaatgttataatttgtaaaaaacattggaggaccttatgaaaattcacgcccttttcgatttcttacatttactagtcttaaccctgaaaagctattatgtatggggaatgcctatctatgtcttcattattcctcttatctttgtagtcggttatattattattaattctaataagaaacaaaaaaacacatctattcaaagtcactaatctattacattaataacctcctaaaaatcatattcccctcattttcttcaaatgatatgatgaacaagggtatatccccaccactcttatagcggtggggattttaatataaatatgcaacatactacacaatagaaggtgatttttatgagaaaatacgcagcaattgctttatgtacgtctgccattctagcaggctgtaatactaacaatgtaagtccagaacctaaaaaagagaaaacggctcaagggattaagaaacaagaagagactgtgcaagaacaaggtaaaatctcatataattcagttacacacgaatctacaaacacaagtattcatattacagacataaaagattctttaaatgaagtacaatataaaatttggcgcacagctgatggcaaggaaagtgctaaatctttttcttctaaagaaaaagagaaacaattcacacttccttttgatataaaggaatttgaaggaaaacgcggtgagttccaaattgaagcaacaggaatgaaagaagatgggaaaacaatcccgcttacgaaatctactattactttcgaacaaaaggttcctgttcttatgtatcacgcaattgatgattatcatggtcaaggcattaaagacttattcgtatcaccagctaactttgaagcacaaatgaaacatttaaaggacaatggttatacgcttttaacgtttgaacgctggggcgatataaataaagtaaataaaccgattttcgttacatttgatgacggtatgaaaaataatatgaatgcatttcgcattttacaaaagctaaaagatgatacttttaaaccggcagcaacagaatatatgattgttgataacgttgatgtagaaggagcattgtctacttctgaaataaaagaaatggttgattccggcattttctcggtgcaatctcatactgcaacacatgcagatttaccgaaaattacaaactatgaggaagagttaaaaggttcaaaagaaaagctagaaaaaataacaggtaagcctgttatcgcgattgcttatccattcggtcatgtagatgataaggttgttgcagaaacgaagaagtattatcaatttgcgacgacgacaaagcctgggcaattcattacgaagggtgaacctgatgaattgttaaagatgaagcgcgttcgtatacaccatacaacgactgtagagcagtttgcttcttcaattaagtaaatataagggctcaacacattttgagctctctttttactttatatttatatatatttttagaattttcttgtattatatatagtaagaaatctttcaaattaaaggagattatacatatgtcatttgaacaaacgttagagaaatatgctgctcttgcagttaatgttggtgttaatattcaacctggacaaactttatcaattagtgcacctcttgaagctgtacaatttgtacgcctcgttacagaaaaagcatataaatctggtgcaaaacacgtatatgtagattggaatgatgagacgttaacacgcttaaaattcgatctagctcctgaagaagctttcgctgaatttccatcttggaaagcacatgctcgtgaagaattagcaaaagaaggcgctgcatttatgtctatctatgcagaaaaccctgatttattaaaaggtgtagaaccatcgcgtatcgcaacagctcataaagtagctggagaagcaatgaaagtataccgtgattacgtacaagcagataaagtaagctggtgtgtcatttctgttcctacgaaagaatgggctgcgaaagtattccctgacgtagcgccagaagaacaagaagccaagttatgggatgctattttcaaagctactcgtgctgatttagaaaatcctgtagaagcatggaaagaacatgatgaaacattacatacaaaagtggattacttaaacgaaaagcattataaagctcttcactatacaggtcctggaacagatttaacaatcgaacttccagaaaaacatgtatgggctggtgctggtagcttaaatgaaaagaacgtaccatttatggctaatattccaactgaagaagtatttacaatgccacttaaaacaggtgtaaacggccaagtttctagtacaaaaccgttagtatttgcaggtaatattatcgataatttcacgttaacatttgaaaacggacgtatcgtagactataaagctgaagctggtgaagaagctttaaaacatttagtagaaacagatgaaggttctcacttcttaggggaagtagctttagtacctcatgactcaccaatttcaaacacaaatgttttattctacaatacactatttgacgaaaatgcatcttgccaccttgcgattggaaatgcttacgcatttaacttagttggcggaaaaacaatgtctaaagaagaacttgctgaaaacggcgcaaacgctagtattacacacaacgacttcatgattggatcagctgagcttgatattgacggtattactgctgatggcagacatgagcctatcttccgtaaaggtaactgggcgttttaaatttattaccataaagaaacacattggataatccaatgtgtttctttatttatttggtttcaattcaaattttattgttctattttcacgcgtaaactctggtctatacgtagcgatatacgtattttctttcgctacgtcaaatagcatgatatcttgaattttttcttctggtgctaactttttactaataaagctatcagggttattatattctttaaatcttgtacctttcttatcggtaatctcaaattcataaaatgcaaaaggtatttcctttttactattattttctactttgaaaataatccccaaaatctcctctttctttttatcctcatcataatccgtatatcctaatttaactgaatcgatagttacttgcaaaccatctacgtctactgtctcccctattttatacactttatcttgaacatcttcttgtttactttcattactatctttagtctcagtgcaagcacttaaactaaaagctatgccaaaaattaaaacaatttgactcacctttttaacatactctttcctccacataagacaatatttcatatgtatcataacaaaatgctttacgctttcttgtcatattttgtcgtattaattgctaactgcacaaatagaaaaaagctatcttctacaaaagatagctttcatgatgccgatgaaaccttaagcccaatgacacccaaaacaataaaaagaatacaaaatgcttgaaataaactaatatgctctttaaaaaagtacacactaatgattgtaataagtaatgttccaacgccagaccaaatagcataagcaatacttaaatggatctttttcacaacgatggcgaacacgctgaaacaaattccataaaacacgaaaatcagtacacttggaacgagctttgttaaaccatttgatagtttcatcgcaattgttccagctacttcaaaaataattgtaacaagtaataatagccaatataccatactagaatctccttctctgttaccttatagagattctagtatactacttatagtcccaatgaaatatatttaatttctaaatattcctcgatgccgaaatggcctccttcacggccgataccactttctttaaatccaccgaatggtgcttgtgcaactgatggaagaccgtcgtttagaccgataataccgtactctaacgcttcactaatttggaatgcttggctaatgtctttcgtgaaaatatacgcagctaaaccgtatggtgtattatttgcacgttcgattacttcatcaactgttttgaatttcgcaactggtgccactggcccaaatgtttcttcattcatacaaagcatcgtatcatttgccaccccaattacagtcggttgaatgaaatgtccctctaactctgcgaccttttgaccaccatataaaactgttccacctttttgaatagcatcttcaatatgttcttgtacttttgaaactgcattctcatcaataagtggcccaacagtcgttccgtcaccgaaaccgtctcctactttcaactgccctactgccttttggaacttctctacaaatacttcgtatacttcttcttgaacgaatactcggtttgtacatatacacgtttgtcctgcgttacggaatttcgaaccaattaccgcttctactgctttatctaaatctgcatcattcattacgataaatggagcgtggccacctaactcaagcgaaacttttttcatcgtttgtgcagcactagccattaactctttcccgatttccgttgaccctgtaaaggacacttttcgaacgcgactatcttccatccatgtatcagcaattgcttttgcactacctgttacgatattgattacgccctttggaatatctgcttcatgagctaattcagctaatttcaatgcagttaatggcgtttgactcgccggtttcacaacggctgtacagcctgctgcaagcgctggtgctacctttctcgtaatcatcgctgccgggaagttccaaggtgtaatagctgccataacgccaactggttgcttcataactaaaatgcgcttattcggatgagaagcaggaatcatttcaccatatacacgtttcccctcttctgcataccattcaacaaaactatttgcataatttacttcaccaagcgcttctgcaaacggctttccttgttccttcgtcataatcgctgcgatttcttctttatttttatcaataagcatgaaccacttttttaacttcgtggcacgatctgctgccgttaacttagaccacgttttaaaagcttcatgtgcagcatcaacagcttgctttgcctctgttactccgccctttggtacagttgcaaatatttccttcgtcgcaggattatttacttcaatttgttcttgtagtgtaatccactcaccatttatatacatcgcctttttatctatacttacgaaagtcgcctttttatccaatgttttcttcctcctctatgaacttcttaattttcctagtagcagcagattgactaatttgcaaaaactcagctactttataacttgatccatacgttttatacgctttaagaataatatttctctctacctcttccagcattttataaaggctttgccccgattgttcaactgcagcctcttgcatagagagtggcaaatcctctaccgttacaacatcatcgacagtaataacaattctctcaattacattctctatttctctattgtttccttcccacggatatccaacaaacatttgtaacgtactcggcgctagtttcacatcacgtccgtattttttattaaaatgctgcaagtaatgataaataagcggcaaaatatcttctgttctttccctaagcgggggaattgcaattggaatgacattcaaacgatagtataaatctttccgaaatgttccttgtttcaccatctcgcttaaatctctatttgttgccgccacaattcggacatccactttttttaattctcttccgcctataggacgaaatgttttttcttgcaatacttgcaaaagcttcgcttgaatttcaagcggcatttcaccgatttcatctaaaaaaagagttcctttatgcgcggattctaatagtccctttttcccttcacgattcgcacctgtaaaagatccacctgaatatccaaaaagctctgattcaattaaattagttggcaatgccgcacaattaatttcatagaaactttcattcttacggtgactcacttcatgtaaatggcgtactaatcgacttttcccaactccagtctcgcctaaaacgagaacagtactatccactacagatacttttttgattgtatcgactattttttgcatagctagacttttaaaaataagtccttcatgctcatatgtttctcttaattcttttttatatgtttttagctgattatccatttcctctaccttttgacgtaattgatagagttcagtaaggtcccgagaataactaatcactcttcttaaatttccctcatcatcaaaaacaggccttgtacgaacgtgtaaatactctcctgattttgtagtttgaacgagttcaattggcctctttttttcaatcacttctaatgtcgctgatggataaaagattccatccttttgtagttcttttacatgcttaccaactaactcttcggcagctagttggtagtgcctttcacatgtactatttacacgcacaacgatcccttgctcatctgtaacaaaaatttcgtcaaacgcatattcaaatacatcttttaaatccattaacactcgttccttttctgcaaccatcctagccacccctaacttcaaatccatcgatccacttcactacctttattataaagtgaattttctgcatttaatatagagtcagctagaatgtttgctatttatacttcattttttaaacgcgagcgatgtttgtttgctcataacaagcttgcaatgattcttcaattattgttaaaccttcttcaagttgctcatctgtaataactaaaggcattaacacacggataacatttccatatgttcctgctgataataacagtaacccacgcttatttgcctctgcacatagattagccgttaacgttttgtcaggtgctttcgtcttacgatcttgaacgacctcaaatgcacacattgcacctaacccacgcacatcgccgatgcaatgatatttatttttcatctcttcgaatcggttcattacgacttttcctaattctatcgctctatcatttaatttctcattttctattacatcgagaacagctaatgcagccgcacatcctaatggacttcctgcatacgttccaccaagttcacctggtgcagactcattcataatttctttacgtccaatgacaccacttatcggtacaccagcacctaatgatttagacactgtaattaaatctggaacgacattatagtgatcaattgcaaaatattttcctgtacgactaaagcctgtttgtatttcatccgctacaaataagatgccgttctctgaacaaatgcggcgtacttcttgaacaaatttcttacttgggacgataaatccaccttccccttgaacaggctccattacaacagctgcaattgtttctggtgctacttccgatatgaagaagttcttaaactcttcaataataaaatcatcatattgctcttccgttaatccctctgggcgacggtattcgtatggaaatggcgctttatatacttctggagcaaagggaccaaacccaaatttatatggcttcactttacttgtcatcgtcattgtcattaatgtacgcccgtggaaacctttagaaaatgcgataataccaggtctcttcgtatatttacgagcgatcttcaccgcgttctcaactgcttctgcaccactatttaaaaagaggacttgcttatcgaaacttcctggtgccaatgccgcaagcttttccgctaattcaatatatggctcatacatcatgacattaaatccagtatgaatgtattgatcgacttgtttatggagcgcttctttaaccgctggatgacaatgccctacgttaattgtcccgattgctcctgcaaaatcaatgtactgattaccatcaacatctgttacaagagcaccatttgcagattgtacaaacgttgggatgccgttacttactccttttggtactatattttgacggcgttctaataaagatgccgctttcggtcctggaatttgttcatttactttagcaaatttttttgtgttcattgcgtaccccatccttttctttacattgttttctctttttattgcaaaatgtatgccaactttcttttctagcatttatcctatattctttgtatccaggcataaaaaataagtctataaagactcattaagagtctttatagacttattttccttacacattagacttttctttctcccagaaaaactcacccgattgagaaataaactctccaacagaatctaacactaaatcagcaagtggttctaatgttggacggtctcccgtaccagatagcaccccaattgcatagcaatcgccatttttggctaaatgtaaatcagttggcgtatctccaacaaccgcaacctcacatgatgctaaattaaatttttcacaaaacacttctataatctttttatctggtttttgcgcagggaatgtatccgaggctataatataatcaaaaaagttctccaacttatattgttttaaaaataattctgttggtgcgaaatcatccgccgtgacaacccctaatataaatcctttatcttttaatgcctgtaacactttcggtaaatctgctgtcattttcatatgcgaacgatgctcatacataagggaaaataacttctcacttacccaatgatgcatctcttcttctctagcagactcaatataattacaaagccccttcgctacatcaaggcttgttccagcagctattgcactcctcggattaacaaatgctccctctacaccaatctcttctaataaggtctgccgcattgtacttggtaaatgatataaacttatacattcagctacaagttcttcagctacttttatccatattgaatgaaaatccattaatgtcccatctttatcaaataatatcgcctttaccttctccatagcaccctacctctcatttcttatctcttccagtgtatcaataaagtatggatgtaaaataaaagaattgtaaaaataccataaaaatcaaactaactcccaatttacaattcattttaacaaagtaaaaaggatgcctttacagggcatcctcttgatgttcaggaacaaatagttctaaacaatgatatatattttcgaattccatcggtgcatctccaccatactcaccatctaaattaatcattagtttatctggtgaatgtactttaattcggttcgcttgtgtatataacacttttggattattaatatgttcaccacgttgtgcttgtgttgctgctttaattaaatcagcgatagaaccttttttcagtactaataggtcaaataacccatcgttaatagatgcatacggtgctaccttttcaaatccacctactgaacgggtattcgtaattaaaaacatcgtaatttcttcttgtagtaactttccatcatactcaatttcaacatatgtcggatgcaatgatggtaacatctcgataccttttaggtaataagcaagttgtcctaatactgtctttaacttactcggtacttcgtatgttaattctgtaatacgaccgccaccagcgatgttaataaaatatgtatcgttcgctctaccaaggtctaatggcactgtttttccttcgcaaataatatctgctgcctcttcaatagaacgaggtacaccaattgcacgtgcaaagtcatttgtcgttccaactggaataattccaaatttcggacggaattcatgcccaactaaaccgtttactacttcatttaatgtaccgtcgccaccagccgcaataacaacatcaaacttacgatccgcagcttgcctcgccgccacagtagcgtctccaggacccgttgtcgcatgacaagatgtctcatagccagcttgttctaatttttgtaatacttctggtaagctcttcttaaatagctcacgccccgaagtaggattataaataattcttgctcgcttcatcatttattagcacaggaaatttctttatgtatcgaaaaagaacatactgaacttctattcagtattcccatgcctacctcctctcatcttgctatccttcttttatcccgctcaaacaggcagtaagaacccgattcgtgtagtccatcaaaagtaaatattcatttcaatggttttttatttgacttcaaaatttatcccgctatttgcgggcagtaaatgcccgattggtgagggctaataatcaatggtggatgaacctcctactgattaaagtttcactttatttctatccattcttccataaaaatttacatataacgaataataactatctattatttcatgagatgaaaaaaacctctatgtttagatttatcattattcccacctttttgcaactatcataccatagttgctatacaaacatttttccacttttgacagttaatcaaacgtttgtttaaacgattttgtctcatttaaacaaacgtttgattaacctagaaaaacacccatgtacgggtgtttttctgcttaatctttaaaagtcactactattatcgcttattaatctcttcaagtaagattttgttaacaagtggtggatttgcttgtccttttgtagctttcataatttgaccaactaagaagccaattgcacggtctttaccgtttttaaagtcttcgatagattgctcattattatcaagaatttctgttacaactttacgaagtgtaccctcgtcagaaatttgaacaagacctttcgctttaacgatttcttctgggtctccacctttttcaattaattcgttaaatactttcttcgcgattttagaagaaattgtacctttttcaattaattgaaccattttagataaaccagcaggcgttaatgcaacgtcttttaattctttttgttgtttgtttaagtatgcaagtacttcacccattaaccagttcgatgttaatttcgcatcagcaccgtctgcaacagttgcttcaaagaaatcagacatctctttcgttaatgttaacacgtgtgcatcataagctggtaagcctaattctgcaacgtagcgagctttacgtgcatctggaagttctggaatagaagctcgaactgcttctttccactcatcatcgatgtaaagttcaactaagtctggctccgggaagtaacggtaatcgtcagatccttctttcacacgcattaagattgttttctttgttgcttcatcataacgacgtgtttcttgttggatgatgccaccagataacagttctttttcttggcgcacttgctcatgctcaagacctttttgtacgtaagtgaatgagtttaagtttttcagttccgcttttgtaccgaacttctcttgtccaactggacgaagggaaatgttcgcatcacaacgtaaggaaccttcttccatcttacaatcagatacaccagtgtattgaatgattgattttaacttctctaagtatgcatatgcttcttctggcgtacgcatatctggctcagatacgatctcgattaaaggcataccttgacggttgtagtctactaatgaaccatcagctgtatgcgttgatttaccagcatcttcttctaaatgaagacgtgtaataccgatacgtttctttttaccgtctacttcgatttcaatccaaccattttcaccaattggcttatcaaattgagagatttggtaagctttcgggttatctggatagaaatagtttttacggtcaaacttcgtttccgttgcgatttcacagtttaatgccattgcagctttcattgcaaagttaactgcttctttatttaaagtaggaagtacccctgggtatcctaagtcaattacacttgtttgtgtatttggctccgctccgaattctgttggactcgcagagaaaattttcgaatttgtttttaactcaacgtgaacctctaaaccaataattgtttctaaattcatctatgctcgcctccttacagacttgctttttttgtatgatagtctgttgcttgctcaaacgcatgtgcaacgcggtaaattgtcgcttcatcgaagtgtttaccaatgatttgtagaccaagtggcatgttgttagcaccgaatccacatggaacagaaatcgctggaacacccgctaagtttactgggattgttaaaatgtcatttgcatacattgtcattggatcatcaactttttcgcccactttaaatgccggagttggcgttgttggtccaataataacatcatagttagcaaatacattttcaaagtcgtttttaattaatgtacgtacttgttgtgctttcttgtaatatgcatcatagtaaccagagctaagcgcaaatgtaccaagcataatacgacgtttaacttcatcaccgaaaccttcactacgtgtgtttttgtaaagatctaataagttatttacattatcagaacgaacaccgtaacgcacgccatcaaagcgtgaaaggttcgcagatgcttcagaagaagatagtaagtaatacgttgctagagcgtatttagagtgtggaagcgatacttcctcccaagttgcgcccataccttctaatacttttaaagcagctagtactgactcacgagcttcttcgccaacaccttcgcctaagtattctttcggtacagcaatgcgtaaacctttaacatcgcctgttaaaccagctaaatagtttccaacttcaacgtttgcagaagttgcatccatgcggtcaatacctgaaatagcttgtaataagtatgcattgtcttctactgtacgtgtaatcggtccgatttggtcaagtgaagatgcgaatgctactaatccgtaacgagatacgcgtccataagttggttttaaacctacaacaccgcaatatgcagctggctgacggatagaaccacccgtatcagaacctagagagaatagtacttctcctgctgctacagctgctgcagaaccaccactagatccgcccggaacgtaatctaagttccatgggtttttcgtagcgtagaatcctgagttttcatttgaagaacccattgcgaactcgtccatgtttaatttaccgattgtaattgtgtcagcagcttttagcttttgcacaactgtcgcatcataaattggatcgaagtttgctaacattttgctcgcacaagttgtacgaagaccgttagttacaatgttatcttttacaccaattggcataccgaataataaaccattatcttcagcgccgatttttgcatctaattctttcgcttttgcgcgtgcattttcttcatctaatgtaagaaaagcttttacgttatcttcaacatccgcaatacgtttgtaagattcttctactaaatccgtaacggaaatttctttgttgtttaacttcttatgtaactctgatactgaatgatcaaataatgacatcgaaattcccctcctctattctaatactgctggaacacggatttgattatctttgtgatccggtgcattttttaatacttcttcgactggtaaacctttttctggtacatcttcacgcataacatttttcatagttaatacatgagttgttggttttacatctgttgtatctaattcatttaactgttctgcaaatgtaacaattgcatctagttgtttttgaaatttttctgcttcttgatcagtaattgcaagacgtgctaaatgtgctacgtgctttacattctcaacggaaattcttgacacggctaggccacctccataatatatcgttcaatctacaatactattgatgataccaaattttcagtacttcaagcaagtcaacacagagtacttacgccatttttacataaaaaaagaaaggcaaatgcctttctttacaatttactctttatctaacggtttatttttcggaaatctctcgttatcttcttcattatcacgaattgttttttgtaatacaaaacaagacatcgttaaaaataatgttccaattaaatagtatccttttacactaagcgtttcatctaacgtataaatcccaattagcatacctgaaatcgcacaaacaaatgaagtccatgctaaaaacgtgaacgcttgcgtattacgtcttctcatcgttctccccctcgttagctgcatacccattatagataagtatatttaccatgatggatttttatgtaaattctcgttttatatttataaatctatcataaaagaatactattttaaagaaagttttctgcctaatctgaaaaaacaattaaaatcattgacaattatttctattctacataaaataaaaataaatattacgaacctcgaaatatacgggagtggaattaattgttgcaatatgaacattttttagacttactgctagataacgccaagaaacttttctatcctgaagaatgggtaagcctagatttaacactttctaaaacagaagtattttgtttactttggatggaacgaaatacagatattacaatgacgaaaattgctgatcttcttgatataccgatgagtacaacaacgggcgttgtaaatcgccttgtaaaaaagggatatattgaacgctaccgtgatgaaaatgaccgacgtattgtattaattcggttaacagaaaacggcgtaatgctcgttcaagaagtaaaacaaaatgcggcccattactttagcttagtaacagaagcattatcagaagaagaaaaagcattcttactacaaatcttccaaaaaatcatgaatcacatcgctacgtcacagcaaaaaacagaagaaaagatttctacacctaaaatgaaaaacattccgattgaataaaaccctatctgggtttttattcaaccatttacttcgacactcgtaatattcgacattcgaaacaaaggggatatgaatgatgagaattatcttgtatacaggtaaaggcggcgtaggaaaaactagcatttcagcagcaacagcaattcaaagtgcgaaacaaggattaaaaacattagtaatgagcacagatcctgctcatagtttaggagattcatttggtataaagctatcttctgaaccactagaaattcgtgaaaatttgtgggcacaagaaattaatacgatttatgaaatggaaaaaggctggggaaaattacagaaatatattacactactcttcacttctaaagcagctgatgatattacaacagaagaattaacgatgtttcccggtatggaagatttaattagcctacttcgcgtactcgattattataagcaagacacatatgatgttatcattattgattgtgcccctacaggagaaacattagcaatgctaagctttccagacatgctcggctggtggatggaaaaattatttcctattaaaagaaaagttttaaaagtcgttcgtcctgtagctcaaccactccttggtgtccctcttccaaccgacgatattatggacgaattaacaagtacacttgaacagctcggagaaatgagagatattttatcaaatcgagaagtaacaagtatccgcatcgttgtaaatcctgaaaaaatggtcattaaagaagcccagcgcagctttacttatttgaatttatacgattataacgtagatgccattatgattaaccgcgtcatccctaacactgtcaccgatccttattttcaggcatggaaagatacacagaagaaatataaaacattaattaaagatagttttcaaccccttcctatttacgaagctccaatgtttgaacaagaagttgttggtttgtctatgttagaacgtgtaggagattctttatttaaaactgatcattcccctacagaagtaaaatttaacgggcgcactcaatatgtaaaaaaggatggcgatgagtatattttcgttctgtccattcccttctcaaacaaaagtgaactttccttaaatcaaaaaggtgatgaacttattattcgagcgggttctgttaaacggaacatcacgttaccaaaaacattaacacacctttctattcaaggagcaaaatttgaagaagatgtactaaatattcggtttggaggtgtagtacatgcatgaggaattactacgaagggtaattcgtacaaaagtaaaagtcgggatgcatatattagaagagctacctaatccaatccaacaatcagctaagcaaatattaaatattttacaagaggaactagctgcttatctgaaagaacgagagcatcatgaagttaatttaaaaaatatcataattgaataaccatctctgtatagagggcctttttttaggctttctatactttattggagtgatgtaaattgatgaaaaaacattccactactatattctggatcattcccttattatttttcattcataaccttgaagaagctttccaaatgccacaataccttgctaatcaattttcaatccgtcttataactagccaacaatttttcatcgccatttccgtattaacaatctttgtattacttatcgtctttctatatcaacttaacttcttgtcttctatatgctggattatttttatacaaggggccatcttcttcaactctgttcaacatattattttgtttttcatttatcgctcttataaccccggcgtaatatcagcatttttcattactctcttttctattttcttttttttatcaaaaaaacacttaattcatccaaagcaattcgtaattacactccttttcagcttattttcttatcccattataatttggatcaccttactgttcgctagctactttcattcataaaaaaagaccaggaaaattcctggtctatcactctacttaacaaacattggattctatgttatacaaaattggaaggtacagaattagggtttgtttgttaagtttatatgttgaacgaactaacagcggaggggttccttctgttagtccattaaacccaatgattattttacgattttttcaagctcatcaagtgaaagatctactgaaatggaaccatcatttgtttctttcttaattgcgtctgttacttcttttgaatgatatagttcaattacttttttcaatgttggatcatctttatctttcttacgagctgcaaaaatattaatatatggctttgcattttcattctttggatcttctaagaaaataggatccttcgctggatctaatccagcttgaccagcaacaccgttattaataactgatgccgctacatcttttaacacacgaggtgtttgctgtgcgataaccggtgtaatttttaatttcttcggattttcagcaataccacttggatctccaaatagaccaaagtcttttttaagctttaataatccagctgcatcaagaagttttaatgcccgtgcttggttcgttggatcgtttggaattgcaatttctgaaccatctgggatttcatttgctttcttatatttttcagagtataaacccattggcgcaatttgcgttgtaccaacagctgtaatatctaacttatgctcttttttaaattgctctaagaaagcaatatgctggaatgagtttaattcaatatctccatcagctaacgctttatttggcgttgtgtaatcagagaactcgaccagtttaatcttaatcccttctttttcagcttttttcttcaaaatttcccaagcgtctccatccgttccagttacaccgacgcgaactactttttctttcgctcctgcacccgtgtctccacttgagcagccgcttaatgctgagactcctacaatcgctgataatgcaaatgctaaaattttcttcattttcttttcctctcttcctttttatgatctgcgtaacaagactttcgcaaagtagtttcctaaattttgagctatctgtacgagaatgataagtaacacgaccgttacgaacataactgatgtatcaaaacgttgataaccatatgtcattgccaagtcaccaagaccgccaccaccgacaagcccagcaactgcagagaattcaattaaaccaactgtcataaatgtgacacctaagattaatggtgctaacgcttctggtacaaggatttcaaaaacaattctaattggtgaggcgcccattgcttgcgctgcttcaattactcctttcggaacggaaacaaggtttgtttcaaccattctagcaataccaattgatgcgactaacgtcatcgggaaaattgccgctgctgttccaatcgtcgttccgataacacttcttgttagtggacttaaggctactaaaaagataatgaatggtaccggacgaattgtattaattatgatgttaagaatagaaaagacccatttattttctaaaaagtttccttttctcgttacatataaaagtaaacctagaggtatacccagaattgtagcgaatataagggttacaattaccattaagagggtatcccccgtcgcatctagtatgcgcggccaaaatatactccaatcaactcgcatgagcttctacctccttcagctgcacttgcagtcttagatgttgtaatgctttttgaatttccctctgctcaccttgcaactctacaagaagatttccaaatagcacattttgaagttcaataatatttccgtacagtacatttacatcgacgttatagttttttgcgatatatgatagtaccggctgtcctgtctcctcaccagtaaatgttagacgataaatttgaccaccattttgaattttcgctagaacactttccggtaaatgatcattaatgacagaacgtacaaagttttgagtcgtctttgtttttggttgcgtgaaaacatcaaacagttttccttcttcaataactttccccttctccattacagctacacggtgacaaatttctttcacaacatgcatttcatgtgtaataagaagaattgttaaattgtattctcgatttactttctttaataagtttagaatttctgtcgtcgtttctggatctaaggctgatgttgcctcatcacatataagaatatctggcgatgtcgcaagtgctctagcaatgcccacacgctgcttttgcccacctgatagctgctctggataatagtttgctttatcttctaaccctacaaacttcagcagttcatttactctttcttttatctcattctttggtactttcgctaactttaatggataagcaatatttccaaatactgttcttgaattaaataaattaaaactttgaaaaatcattccgattctttgtcttagtttacgcaattctttcgtcgataatgatgtaatatctttatcatctattgaaatcgttcctgccgtcggtctctctaacatatttactaagcgtaataacgtactctttccagcgccactaaaaccgataatgccaaaaatttcgcctttctcaactgataatgttacatcctccaccgcatgaacagattggccagctgattcatacactttacttacattggtaaaagaaatcatttttttccctcctatatgctgtaaaaacttgaagcagagctttcgaggtaaaataaaaagtgccctccttcttatcaaccataaagataagaaggagagcacttatatgtactcgttcacatcttctcatcttccaagcctttatatggcttgctggagttagcacggtattaaaaaaacccgttgctgaggtatcgtagggccagtccctccacctctctggataagaatgtatcgatttaattgtcgtttaattaattctcattatagaactcagaataataagagtcaatacattttttagaaaaatattaattattcctttattaaaattttcagatgaatattcatctgaaaattagtaactttcaaggttatttaaaattcttcttcctcatatttttaaacaggagaatcctctctacgaattgaataaatttatttgaatatgaaactcggaggaagataaatatatgaaaacagctcttttactcgtcgatattcaaaacgattattttccaaatggaaagatggaattgcgtaatccagtagaagcaagcgaatatgctaatcagttattacaacaatttagaacaaacagcgaacctatttttcatatccaacacgtagctataaaagatgacgctacttttttcctacctaatacagaaggtgtacatattcatgaaagcgtacgtccacttagagaagaaacagttatagtcaaacattatccaaatagcttccgagaaactaatcttctagagcaattaaaacgtttaaatattgaacatgtcgttgtatgcgggatgatgactcatatgtgtatcgatgcaacagtaagggctacattcgattttggctttcaatgtaccgttatacatgacgcttgtgctacaaaagacctttcttttaagaacgctactataccagctgtttatattcacaatacaattttagctagtttaaatggcgtatatgcaaatgtaataagcacgcaagaatttttagctacataaaaaaacactcctttcagtgagcaaaactgaaaggagtgttccttgtcgaaccatagattttctttcaaattgtattatacaggaaattctcaaaatgaatactaaaaaatatgactaataagtcaacttttctcatcattttatttctgttcacatgtttatcacgctattaataggttttagctcattctcttcgaacgacggtaatatatggggtttcaattttaaaaggagctcttcacattctgtgaagagctcctctactatttcttataaagtttcagaagtagtttttgcttgcatgtgaagtgctaagtaatcaggtccaccagctttagagtctgtaccagacatgttaaagccaccgaatggttggtaacctacgattgcaccagtacatccacggttgaagtataagttaccaacgtggaagtcttcgcgtgctttttcaatatggtcacggttgttagtaataacagcacctgttaaaccgtattccgtattgtttgcaattgcaagtgcatgatcgaagtctttcgctttacagaatgctactaccggtccgaagatttcttctttcattaagcgagcatcttctgcaacgtcagcaacgattgttggttggatgaaccagcctttagaatcgtctccttcgccacctgctaagattctaccttcttctttaccaattgcaacatagctcattactttatcaaatgcagcttggtcattaacaggacccatgtttgtacctaatactgctgggttagcaactgttaattcttttgttaattcaacagcacgatttaatacgtgatcgtatacatcttcatggattactgcacgagaacatgcagaacatttttgtcctgagaatccgaatgctgatgcaacgatagacttagctgctaattcaagatctgcttctttatcaacaacgattgtgtctttaccgcccatttcagcgataacgcgttttaaccaaatttgtcctgggtttactttcgctgcacgctcatagatgcggatacctacatcacgagatcccgtgaagcttacgaaacgtgtacgaggatgatctactaagtagtcaccaacttcagaaccgttacctggaacgaagtttactacaccagctggtaagccagcttcttctaatacttccataaatttcgccgctactacaggagttgtactagctggttttagtaatactgtgttaccagaaactaaagcagctgttgtcatacctgccataattgcgaatgggaagttccaaggagaaatgataacacctactcctaatggaatgtaagagaaacgattatattcaattggacggctttctactggaataccgtcttttaattttaacatttgacgaccataatattccataaagtcgattgcttctgctgtatcagcatctgcctcattccatggcttacctgcttcttttacaagaatagcagagaattcatgttttctgcgacgaacgattgctgcagcacggaataaaatgtctgcacgcatttctggctttgattttctccaagtttggaatgtttcatccgctacttgcattgctttttcagctaactcacggcttgcttttgaaacacgaccaacaagttcttctttatttgcagggtttacagaaacaattttgtcttctgtagtgattttttctcccccaataattaatggatagtcttgtccaagataagattctactttctttaaaccttcttcaaacgctaatttgttagcctccactgaaaaatctgtaaatggctcatgtttgtatgctactaccattttttttagcctccccttagaaaaacgtttacattttacaacattattctacacgataatttagatttattcaaatattcctagacttatattttaaaaattaataaatttttaaaatataataaaaaaaagagattcatacatgcgtatgaatctacaaaatatgagtatattccaaaacatttttcccgatcaataatatagtaactaataaaaataaagtccttacatatccaacacctttttgaaccgcaaacttcgatccaaaataagcacctaagatcattgataatcccatgataataccgtattcaaaatgaattatgtctaagaataaaaaagtaattaaagatacaatattactaacaaagttcaaaagttttccagatgctgccgcttgaataaaatccaagccaattaataaaaatgcaaaaattaaaaacgaccctgtccctggtccaaaaaacccatcataaaatcctatcattaaaatagcaaagaaaaatattaatgtttttctttgcgtcatcttcttataggtagacacacttccccaattcttttttgcaataatataaatagcaataaataccaacattacaagtactaatgggcgtaaaatatccgatggaataaattttactactaaagcacctgcaacagctccaacaatagttaacgggattaactttcctacaattttaaaatcaacttttcctgatcgaatgaaatacatcgcactcgtaaacgtccccattgttgccgctaatttattcgttgcaattgccgaagctggcgataggccaacaaacataagtgcaggaagcgaaattaaccctcctcctccaacaacggaatcaataaaagctgctaaaaaaccgaatgcaattaataaaataatgacttgaaaacttaattcttccatgagctttacccctcacccctattttttacaacattttaaattataacaaaattacataagaaaaaaagctgttccatagaggaacagccttcatatttaatctaaaattttcacaagtggttcatcttgttttgcttcacgtataataatagcttctgggcgttctacagatttaatcgttacttgtactttcatataattcgggaagtattccataacaagccctgccacatattgtgtaaaaccaactatttccgcttttccattaaactggacaggaatatcaagcttcatttctcttaattcatcatctctatacataccagtaccaataacagctgtatagtcgccttggaaataatcgcttagttttgccttaaagttggatactcttgcaagatcttcacgtttattatctgttttcgcttgctctgatgggaacaaataatatttttcattaatttgtttccaatcttcaaccgtttcactacctttttcgacatttgcataagaaacaaaattacctggcacgagcgaagactttggagcttggcgataaatcgcaaatgttatcggaatattttttgtttcaggttctttttgatgtatgactttcaaaatttcttgcgccatttttttcccttcagctaacatcttttcatctgggattgcagcttcacgtgggtaaccatgctcttcgttaaaatattgaacagaattcatcgctaatccaactaccataccaacacgttcctcgccgttatcgccttttttcacataataatcatgctctaaaatatttgaaatatatattggattttttttatttttcacttctagtgattcggatcctgttcctaacgcaggatttaatcctatatttggaaatttaactgcatctttttttaatttttcctctagttccttttgttcagcatctgtacgttttcttttaacaagcatctgtatagtttgagtatctagagcttttccgccttttaaaaaattatctttcgtactaaatgattcttttgcaattcgcattaatcctgtttcaaattcatctatatcaaggcgactatttaacccttgcaccactaaaccacgtgcctttccaccatcaaatggaatagtcgtcttataatattcatccgaaatagcgtattttggaacaactgattgttcttttgctttccccgatttcccagccactttttcatctttgtcggcacctgcactacacccacttacaagtaggccaaggcttaataccgctaatgctatttttttcatggtaagtttgcacctcttacttatttagctcttgtaagaacctctcttcattccaaacctcaacattatgtttctccgcttgtgctaatttcgaaccagctgcttcacctgcaacaactaaatccgtactcttactaacacttcctgttacttttccacctaatgcctcaatcttcttcttcgcttcacttcgtcccataacttctagcttacctgttaaaacaaccgtttttcctgcgaagtaagattcaacattttgtaaatctgcaatttttatacctttgtatgtcatattcacgccatactctttaaactgctgtaataactctaatacatcttcattatcaaaatatgtcacaacagattgagccattttttcgccaatttcattaattgcttttagttcttcttccgttgcttttacaagctcatccatcgtttcaaagtgctctgcaaatgtacgtgctgctttcgctccaacgtggcgaattccaagaccaaataataatcgctctaacgagttttctttagaattttcaattgcttgtattaagtttgttgctgatttttcaccaaaacgttctaactgtaataattgctctttcgtcaatgcatataaatcagcaaatgtacgaatgtaatcagcatcaaagagttgtgtaatgacacgttctccaagtccatcaatattcattgcatttcttgaaacgaaatggattaacccttctcgaatttgagcaggacaagttggatttatacaacgaagtgctacttcttcttctaaacgaacaagttcactctcacatgctggacaatgagttggcatgcggtattcttcttcctcaccagtacgcttatcaaaaataacgttcacaacttcaggaataatatctccagccttcttcacaacaacgtagtcaccaattcgaatgtctttttcacgaattaaatcttcgttatgtaaagaagcacgacgaacaatcgtaccagcaactctcactggctctagttctgcagtcggtgttacaacccctgttcggccaacacttaattcaatgcctgttaatctcgttacaacttcttcagccggaaatttataagcaatcgcccaccttggactcttcgctgtagttcctagactttcttgaagagcaacatcatctacttttataacgattccatcaatctcataatcaagatgcggacgtttttcttgccattcttctacataagctataacttcttcaattgtttcacatgtacggcgatttggatttgtcttaaatccaagttcacctaagaaatccagcgattcactatgtgatgaaattgttttttcttctacattcgcaagaccatacacaaacatagataagttacgcttcgctgcaattttcggatcaagttgacgtattgaacctgctgctgcattacgcggattcgcaaatacatcttctccattttgctctttttcttcatttagtttaacgaatgaacgcttcggcatataagcttcgcctcttgcttctaacgttacttcttcatttaaacgaagtgggatagctttaatcgtttttaaattttgagtaatatcttcacctgttacaccatcaccacgtgtcgccccttgaatgaagcgtcctttttcataatgaagcgaaacggcaagcccgtcaatttttaattcacatatatatcttacattcgcaccatcaattccttgacgtactcttctgtcgaaatcacgtaaatctccttcgttaaatgcatttcctaaacttaacattggtgacttatgtgttactttttcaaatatatcaagaacagtccccccaacgcgaacggagggagaatcttcactcataaactctgggttctctgcttctaattttataagctcctgcatattacggtcatattccgcatcagaaacagaaggattgtctaatacgtgatattgatagttaaatgtatttaacaagtcacgtaattcttctatacgtttttttactatctcttttgacatatcctcattcctttcctattgtttcgtcacaggcgcaaattttgctaacaaacgtttaacaccaattgggcttgggaacgcaatatctaattcttttgcatcaccttcaccttttacacttacaactgtaccgactccccatttttggtgggaagctttatctcctactgcccagccaatttgttcgccgcctgtcgtcttagctgcagggcgcgcgaaagctgaacgagagcgtgttgctgttgtgattgtcgttttgccgctacttgccgttctgccttttgtaccaaacgatgtttcacgcttcggcgctgtttcatttaatgattccactagttctgtcgggatttctgtaataaatcgagacgcagcgttcatacttgttctaccaaataatgtacgcatttgcgcgttagataaatatagctcttcttctgcacgagtaatacctacataagcaagacgacgttcttcttgcatttcatcctcttccataagagaacgagtatgagggaatatcccttcctctaagccaacaataaagacaaccgggaactctaatcctttcgccgagtgcatcgtcattaaaataacttcttcaccagcagttgggtcttcatctacacgatcaatatcagcaacaagtgctaaatctgttaagaatgcaacaaggctcttatcttcgctttgagattcaaatgtttgcgtaacagataagaactcgtctaagttttctaaacgaccttccgcttctaaagaacgttcatttttcaacatatcgcgatagcctgttttttcaataacttcttctactaattctgtaacagataaatactcttgcatatttacccagttatttaataaattcgcgaattcttttactgcctttgtaatttttgcacttactccaacatgctcaatctcatcaaatacagcagttaatgaaattccattttgcacaccgtaattaataattttatcgatagaagtcgcaccaatgccacgctttggcacatttataatacgtgcaaaactaatttcatcatctggattaccgattaaacgtaagtacgccaaaatatctttaatctctttacgatcgtagaacttcgtacccccgacaattttatacggaatgttagatttaaggaaaatctcctcgaccatacgagactgagcattcgtacgatatagcactgcaaaatcagtatattttcgtttccccatttgaatatcgtcacgaattttttttgcaacaaaatacgcttcgtccttttcagttgcagcacgataatacgagattttacttccaacttgattgtctgtccataatttcttcggcttacgattcgtatttttttcaataacagcattcgctgcatttaaaatattttgtgacgaacgatagttttgttctaacagaattacttgtgcattctcatagtctttttcgaatgacaaaatgttagaaatatctgcaccacgccagcgataaatagactggtcagagtcacccacaacacaaagatttttaaaacgcgctgccaaatgtttaacaagaagatattgcgctttgttcgtatcttgatactcatcaacatgaatatattggaacttacgctgataaaactctaatacttctggaacacgttcaaatagctgaatcgtcgtcataattaaatcatcaaagtctaatgaattatttttcaaaagacgtttttgatactctgtgtatacatcgctcgttaatttttcatatggatcagccattgtaattttttttgcatatttatccgcagataacagttcatttttcgcattactaatacccgctaaaatagagcgcggctcaaatttcttcggatcaacattgcgctctttcataatttttttgactacagttagctgatcacctgaatctaagattgtaaagttacgattaataccaatacgatcgatatcgcgtcgtaaaatacgtacacacatagagtggaacgtcgaaatccaaatatcttctgcttctggtcccacaagtgtatcaatacgctcacgcatttcacgagctgctttatttgtgaaggtaatagctagtacattccatggtgctacacctttttcaccaagtaaatacgcaatacgatgtgttaacacacgtgtcttaccactacctgcacctgccattaatagaagtggtccattcgttgtttgtactgctttttgttgctgtggatttaaaccgtttaataacttatctgtcatactcatatacgcctgcacctactctccttttactgctttaactatttttaacgccgattttatatcatcataaataatatttccaacaactactgtatcagcatattgtgccatttctttcgcctgttctgcattagaaataccaccgccataatataacttagcttgtttcaattctgcttttacatttttaacaagttcaacatctccatacgtaccgctatattctaaataaaatatcggtaaacgtaatagcttgtctgctaaacgagcatatgcaataacgtcatcttctgttaaatcacatttcgcttctgtaagctgggctactttcgcttctggatttaaaacacaatacccttccataaaaatttcgtcccagtccataatatccccaaattctttcaatgcctcatgatgaacacctgttacccattctacttttcggctatttaaaacacttgggatgtaataaaaatcaaatcctggtgtaattgcttctacatcagaaacctctaatacacaaggaactgcatatctacgaatgctaactagcatgtgtaatacgttatcaattgtaactccatcacttccgcctacaataaccgcatcagttccagactcacaaatcatttctaaatgttcatcgcttaactccttatttggatcaagcttaaatacatgtttccatccggaaatatcgtacatgaaaacacccttccttttctctagttatatatatttctgttcaaaataacagtttattttcatcattattgttttaacttcatcttaaatatttgtttaaaacggagaattaagtttggaattacctcttccatattttttaaactagaggatttaattttgaagttccttttatgcattctttcattataacaaaaaaagttacttacacacacgcacaatccaacatctttttccacgtcaaatgttggattacatatcccaaaaatcaaacgggatactaataagagaaatagtattatctatttcaactttcataaaaaggagtgtttttctaatgaagcaaaatatcgggacaataaacgctctaattcgaattacacttgggctcgtcctcttcggatgtagtgcaactaaacttgtacgcaagccgtggtgcacttggtctaacatttttctatggattggtgcaatgaaagttgcagaaggaattgttcgtttctgccctgttgttgaaatgtggaaattcggaaaatacatgaatatgggggcatttaaaatgcctagcatgaattttggtgaaaaaggacatgctaaagaagaagtgaatcaaacttccactcatgacaagccagagtcaaaaggaagttatgacgcttctgacaaagagattgagtcagcgattgaagatataatcctggcaaaaccgctttgaatcatttgtcacgatgcaagatgctctcaaagggacttagctgctgcagtgggcggttaagtcttctttattttactataaaacagaacgtatattctctttttgaaccttaaaatgtatataaaagatatcaaccaataaaattcagaaaattagatgcatacctcttgcttaaaatgatataaaagtgatatcatttttatatcaggaggcgatcatatgaaagaaaaacaagtattttatgtaaatggttttctcggtattattggaattttgattttagctgctatcggtgtatttttccttgcacaagaaattttcataggagcggcactaactattatattagccgcagttctcgctacaggtatcggtattgttcaaccgaatcaagcgaaggttattacgttcttcggtaattatttaggaacaattcgtcaaaacggtttatttttaacgattcctttcgcattccgtcaaactgtatctttacgtgttgaaaactttaacagtaaaaaattaaaagtaaatgacgttgatggaaatccaattgaaattgcagctgttatcgtatataaagttgttgattctgcaaaagcaatgtttggtgttgaacattatgatcgatttgtagaaattcaaagcgaaacggcaatccgccatgttgcaacaaaatatccttatgacaatttccaagatgaaacctgcgttacgttacgcggaaatactgaagaaatctctgaagaattaaaacgtgagttagaggcgcgtcttgaaattgctggtgtagaagtattagaaactcgtttaacgcacttagcttacgcaacagaaattgcccatgcaatgctacaacgccagcaagcaaaagcagtattagctgctagaaaagaaattgttgaaggtgctgtgaagatggcgaaagattccatccatatgttagatgaagaaggcgtactagaactcgatgacgagcgtaaagcaaatatggtaaacaacttattagttgccatcgtttcagataaaggtgcgcagccagttattaatacaggaagcctatactaagggctataagtaattatggctaaaaagaaaagctttccattacgtattgatcctgaattacacgcagtcatcgaaaaatgggcaaatgatgaatttcgtagcgtcaatgcacacatcgagtatttacttcgagaaatggcaaagcaaaaagggaaattaaaaaaagatgaagatgcataaaaaatcccgctgattcctcagcgggatttttacatattaacttttcgtcatctcatgcccaattgcacgatatcctatatcacttcgataaaatagaccatcactctcaattttaccgatttctttatatactttatcttttgcttcttgtaaactatttgccttacaagcaacaaataatacacggccaccgttcgttacaaagtccccatgtttcattgctgtacctgcatggaaaacaatcacatcttgcagtgcatctagtccgctaataatatcaccttttttatatgcttctggatatcctttagaagcaagtacaacaccgattaccgcttcttctgaccattgtaacgttagttcactttcatctaatacagcgttacatacatcaactaaatcgttttctaatcgaggtaatacaacttctgtttcaggatcaccgaagcgtgcattaaattcaattaccttcggaccatcatttgttaaaataagacctgcgtataaaatacctgtaaacgaacggttttcttcaatcatcgccttagcagttggatgcaatacggtttgaatcgcttcttgaactgctgtttctggaatttgtggtactggagaatatgcacccattccgcccgtatttggacctttatcaccatcaaaagctcttttatgatcttgggcgattatcattggatgtacagttgttccattcacgaatgccattaatgaaaattcttgtccatctaaaaactcttcaataacgaccttcttacttgccgcgccgaatttcacatcttgcagcatttctttcacagcttgtaatgcctcttcaagcgtcatcgctaccgttacacctttaccagcagctaggccgtcagctttaataacgattggtgcaccaactttttgaatgtactgtactgcttcttcataatctgtaaaagtttcgtacgccgcagttggaatatcatactttttcataagctcttttgtaaaagctttactaccttcaataacagcagccgctttattcggaccaaatacgcgaagtccctcttctttaaaacgatcaacaattccattcataagcggaatttctggtccaacgaaagttaactcaacattattctcttttgcaaataaaactaatgcatcaaaatcattttcatcaatatcaactggtgttgcaacatctctcataccttcattacctggtgctacatataccttttctactttttcagattgtgcaaacttccaagctaaagcatgctcacgcccaccgcggccaattactaaaacattcatatttcatcccccaataattaaataagtacaaactagaagctatgctcctagtttgctttttcatatcaataaaaggttatctcgaccagactttttaaacatccatatcaataaaggtttaaaaaggaggattaagagaaccgagcaggtctaggcgcatttgccaggaggacacggagtgtagctttcctacatgagtaccgcactggcgatgcaacgacgacatgcgaaggttatctcgaccggactttttaaacatccatatcaataaaggtttaaaaaggaggattaagagaaccgagcaggtctaggcgcatttgccaggaggacacggagtgtagctttcctacatgagtaccgcactggcgatgcaacgacgacatgcgaaggttatctcgaccggactttttaaacatccatatcaataaaggtttaaaaaggaggattaagagaaccgagcaggtctaggcgcatttgccaggaggacacggagtgtagcttttctacatgagtaccgcactggcgatgcaacgacgacatgcgaaggttatcttaaccggactttttaaacatcctctattagtgtttgaaatgacgtacgccagtgaacaccatagcaatcccataagtatctgccactttaatagaatcttcatcacggattgatccgcccggttgaatgattgctgtaattcctgcttttgctgcttcttctaatgtatctggcattgggaagaaagcatcagatgcaagcgcgctaccttgtgctttttcaccagcttgtgtaattgcgatttttgcagaacctacacggttcatctgtcccgcaccgacaccaattgtcatgtcatctttcgctaaaacaattgcgtttgatttcacatgttttacaactttccaagctagttttaaatctttccattcttgctctgagggttcacgtttcgttggaattgaaattgtactttcatctaatgataacgtatcttcctcttgaacgagaagtccaccttgtacagaagttagttttttgcttgcacttgtcgctttttcaatatttatagttaataaacgtaagttcttcttactttgcaacacttctaaagcttcttgcgagaacgaaggtgcgataacaatttctaagaaaatttcatgtaacttttctgctgtagctttatcaatttcacgatttgctgcaataataccgccgaagattgatactggatctgcttcataagcacgagtatatgcttcgtgaatattagttcctactccaacaccacatggattcatatgctttactgctactactgctggttctgtaaattcttttacgatgctaagcgctgcgtctgcatcattaatattgttatacgataattccttaccgtgtaattgttctgcgtatgcaacagaagacgttgctgcgaatggcgctttatagaaagttgctttttgatgtgggttctcgccatagcgtaagtcttgctttttctcaaatgtcacagttaatgtttctggactttcttcacccatttgctctgttaagtagttagaaattaacgcatcatacgctgctgtatgacggaatactttcgctgctagtttacgttttgtttcctctgctacttcaccgttctctttcagttctgctaacacaatatcataatctactggatctacaattaccgatacgaatttatgatttttcgcagcagagcgaatcattgttgggccaccgatatcaatattttcaattgcatcagcaaatgttacatcaggcttagcgattgtttctttaaatgggtataagttaacaacaacaaagtcaattggctctatacctaactcattcatttgtgttacatgtgtttcattatcacgaactgctaatagaccaccatgaatatttggatgtaatgttttcacacggccatccataatttcagggaaaccagttacttcagaaatgccgattacttgtaagccattttcttctagtaactttttcgtaccacctgttgaaataacttcaatcccttgttctagtaaccctttaacaaattctactactcctgttttatctgaaacacttactaatgcacgctttttcatttatccttcacccctggttgtatgttagttaacagttgattctttcacagactgaacaatttgattcactgtatttacgtataatttatgttcaacttgttgaattttcttttgtaagctttctctcgtatccccttcagaaacaaccactgcttcttgtgcaataattggccctgtatccatacctgcatctacataatgaattgttactccagttactttcacacctgcttctaacgcttgaccgacagcatctttacccggaaagctcggtagtaatgatggatgaatattaataatcttcccgccgtatgcttctagtaacgtcggcccgattaaacgcatatatccagctaaaataacataatcaatttcatattcttctagcttctttaatatctctttttcaaacgcttcttttgactcatatgctttcgctgaaaaagcaaaacacggaatatgatgataatttgcccgtccaacagctcgtgcttctggtttatcacatactaataaactaatttctgcatccaatcttttttcttctaccgcattaacgagagattgaaagttagatccacttccagaagcaaaaactgctaatctactcatagtgctgtgcccccattaaaagtaacgccagctccttgtatagtacgtccaataatacgagccatttctccttgctcttcaagaagacgaacaacatcttttgcatcttcttccttcactgctactaccataccaatacccatgttaaaaatattgaacatttctttctcttccagttttccaacttcttgaagcaaactaaagatcggctgaatttcccaagatcctagttcaatctcagcaccgattccttctggcaacatgcgtggaatattttcaataaatccaccacctgtaatatgcgccataccgtatacttcatgtttcttcaatagttctaaaataggtttgacataaattttcgttggttttaataattcttcaccaagaggtagttctaagcggccataaatacgctctaaagatagttccccatcttctaataacacttttcgtactaaagagtaaccattgctatgaataccgctagatgctaagccaattagcacgtgaccagcttcaatcttttcacctgttacaattttctttttatcaacaatcccaactgtaaaaccagctaaatcatattcttccgtagaatacattcctggcatttcagctgtttctccaccgattaatgcacaaccagcttggcgacagccctctgatatacctttgacgatgttttcaattttactaggttcagctttaccacaagcaatataatcaaggaagaaaagcggctctgctccttggacaacaatatcatttacacacattgctactgcatcaataccaattgtgtcatgtttatctgccataaaagcgagcatcaatttcgttcccacgccatctgttccagatactaatacaggttcttctaatgcaaattttgatagatcaaacatacctccaaaaccgcctaaaccgcctagtacttcttttctcatagttgtttgtacgtgttttttcatgcgagataccgcttcatatccagcttcaatatctactcctgcttgcttatatgcattcgccatcgttatttacacctcgtcttttaatttctccccatccagggcgggctattttaagaaaggatctagctcctacatcaaaagaagtagaagcttttctcacttttcttatttcatactttctaaaagctcttgctcataatcataaagagctgttggatagtccccattaaagtaagccatgcataggccgccatatttcccttcatatggacgcccaattgcatctactaatccatcttcgcttaaaaatgttaaagaatctgctccgatcatttcacggatttcttctactgtatgatttgctgcaattaattcttttctcgtttgaatatcaatgccatagaaacatggatatttcagaggtggtgaagcaattcttacgtgaacttctgtcgctccagcctcacgaagcatacgaacaattcgtttacttgtcgttcctcttacgatagagtcatcaatcataacaactcgtttcccttcaactacacctcttactgcggaaagcttcatcttaaccccttgctcgcgcagttcttgagaaggttgaataaacgtacgtccaacgtaacgatttttaattaatcctaactcatatggaatacctgtcgcctccgcatagccaatcgcagctgaaatactagagtctggtacaccagtaacaacatctgcttcaataggagcttctgccgctaaacgtttccccatattcttacgtgctgcatggacgttaacaccagcaatattagaatctggtcgtgcaaagtaaatatattccatactacaaattgcatgttctacatcgtttgtgaaacgatctacgtgaattccttcatcattaatgataagtaattcacccggttctacatcgcgaatgtatgttgcacctactacatcaaaagcacatgtttcagatgctacaacgtaagcatcccccatctttccaattgaaagcggacggaacccattcggatctaatgcaacgatcatttcatttccagttagtaaaagatacgcaaacgcacctttcactttatttaaagcctcttttacactttcaattaaagaatctttcgtgctacgtttaataagatgtaaaagtacttctgtatctgaactagtttgaaaaatactgccctctgcttctaattcacgacgaagcatttttgcgttaattaaatttccgttatgagctaacgccatactatgatcggaaaaacggaacaacaatggttgaacgttagcaacttcacttccaccagctgttgcatatcgtacatgtccgattgctgattttccatttaatccttctagctcacctcttgaaaacacttctgatattaaacctaaccccttgtgaccgacgattttttccccattatttacgacaatgcctgcgccttcttgcccacgatgctgtaaactgtgcaatccgtagtatgaaacttgtgctgcattttcatgcccccaaattccgaaaacgccacattcttcgtttaacccctttatttcagcaagcatgggattgcccctttccaagcctttctcatttcatctacatttgctgtaagtaatacttcattttcttcattatgaattgttacttcatttgtacttgttacttctccaacttggattgcttctactgctttctcaaacgcctctttattttcacgttttacagttatcacgaagcgagactgtgattcagcgaataatgctgctgttgcttctccatctaatttcacagtagcacctaagcctttagcaccaattgcactttctgaaatcgcaactgctaaaccaccttcagcaacatcatgtgcagattgaacaagaccagcttgaattgcttctaatacttgtttttggcgttttaattctacatctaaatcgatacttggtgattgaccgaaaattttgccgtgaatcattttctgtaattcacttccgccaaactcagctttcgtctcaccaattacatacactaaatcaccagcttgcttaaactcttgtgttgttacatgttttaagtcatgcacaagtccgaccatcccaacagttggtgttggatatacagcttcaccactacgctcgttatacatcgatacgtttccgccgataactggtgtttgtaatgtgcgacaagcttcactcataccgtctactgatttctcaatctgccagaagatttctggtttttctgggttaccgaagtttaagcaatctgtaattgcaagtggctctccgccagaacatacgatattacgcgctgcctctgctactgcaattttaccgcccatctctgggtctagataaatgtagcgagagttacaatctgtcgtcattgctaatcctttttctgtaccgcgtacacgtacaactgcagcatctgaacctggcgtaacaactgtgcttgtgcgaacttggtaatcgtattgatcgtatacccactctttacttgcaattgttggttgctgtaataaagcgaataacgtttctttataattttctacttttggcgtttccattttcattgcttggaattcagcaaagtatgctgcttcttttgatggcttatgataaattggtgcttcttctgctaaagcatctgctggaacttcagctaccttttcacctttatggaataaacgaagcattttatcttctgttactttccccatcgtaaccgctgcaagaccatacttctcaaataaatctactatttcttgttctctaccttttttcacgacaattaacatacgctcttgtgattcagatagcatcatttcatatggtgtcattcctgtttcacgctgtggtacatcatctaagtacatttcaatacccattcctgctttacttgccatttctgcagatgatgatgttaaaccagccgcacccatatcttgaattccaacaagtgcatcggattgaattaattctaaacacgcttcaataagaagcttttccataaatggatcccctacttgaaccgctggacgtttcgcttctgagctttcagatagttcttccgacgcgaatgttgcaccgtgaataccgtcacgaccagttgatgctcctacgtacattactgtgttaccagcaccgtgcgcttgcccttttttaatgtcttcgtggttaatcaaacctacgcacattgcatttacaagtggatttccttcataacatggatcaaattgtacttcgccgccaacagtcggaataccgatacagttaccgtatcctgcaattcctgctactacttcttcgaataaatatttcacacgtggtgactgtaattcaccgaaacgaagtgagtttaatagagctaccggacgtgctcccatagagaatacgtcacgaatgataccaccaacacctgttgcagctccttgatatggttcaatagctgaaggatggttatgactttccattttaaatacaactgcttgattatcaccgatatctacaattccagcaccttctccaggtccttgcagaacgcgctcacctgtcgttggaaacttacgaagaactggtttcgaatttttataactacaatgttcagaccacattacagagaataaccctgtttctgtataatttggcagacgacctaaaatcttttcaaccatggcaaactcttcgtctgttagccccatttccgcatatatacgctcttctttaatttgtgttggatttggttcaagcattaacgacatatgtttccctccactgttttaagatagattgaaagacttttaacccttcagcaccaccaagtaattcatctacagcacgctctgggtgtggcatcataccaagtacatttcctttttcatttacaataccagcaatatctgaaacgctaccgttagggttttctacgtaacggaatgcgatttgattgttctcttttaattgtttaagcgtcgcttcatcacaatagtaattcccctcaccatgcgcgattggaatattaattacttcatcttttccatattgtgatgtaaacatcgtttcattattttcaacacgcaactgaacagtgcgacacataaattttaagttttcgtttctcattaacgctcctggtagtaatcctgattcaacaagaatctggaatccattacatacacctaaaatcggctttccttgctcagcagctttttgcactgctttcattgcattagcaaagcgagagatagcaccgcagcgtaagtagtcaccataagaaaatccacctggtagtagaattgcatcatattcatctaaattctctgtatcgtgccaaacgtaatctacttcttcgccaagctcatctttaattgcatggaacatatcgacatcacagttcgaacccggaaatactattacggcaaatttcactgtgcgacaacctcctcaacttcataacggaagtcttccattacaacgttcgctaatagtttttcacacatttcctttaccttgctatctaaatcagatacagatttatcaattgttagttccatgtactttccgattcgaacatcttgtacttctgtgaatgaaagactatgaagtgctccttttactgctgttccttgtggatctaatacgctttctcttaatgttacatataccttaactttatacatgtgaaattccccctaaacgttttaaaatctcttcataagcatctgttaaatttccaagatcgcgacggaatacgtctttatcaaacttttcattgctcgtttcatcccataaacggcaagtatctggtgaaatttcatccgctaaaatgatttctccttcttccgttacaccaaactctaatttgaaatctactaatcttacacgacagcttgcgaaatgatcaatcaacacttgattgatttgtagagccatatctcgtaatacgcttacttgctctggtgatgcaacgtttaatacacgaatatgatcttccgttacaagcggatctcctaaatcatcatctttgaagtaaaattctacgattggttctgcaagtacagttccctcttccattcctaatcgttttgaaagacttcctgcaattacatttcttgtgacaacttctaaaggaataatactcacttttttaacaagttgttctgtttcagataacttctcaacaaaatgtgttttaattcccacttcttgtaactttctgaacaataaagttgtaatttcattgttcaaacgacctttccctgtaatcgtctcttttttctccccattgaaagcagtcgcactatctttgtactctacccaaaccatatctgctgattctgtacgataaattctttttgccttaccttcatacagcaattctagcttttgcatttcgcaagccccctgtagtttgaaaaatgtgaataatgtttttataaagaatggcacagaatgactctattctgtgccatatgaaattttacgcttcgtttaatccaaggcgttcaaagattgtatcaacgtgttgcatatgatgctcatagttgaagcattcattaatttcttcttgtgttaacttgcttgtaatacgctcatcagcttctacaagctctttaaattgtacttgtgtttcccaagcttccatcgctttaggctgtacgatatcataagcttcttcacgtaccatacctttgtcgattagtgtaagcattacgcgctgagaataaattaagccgtatgttcttgtcatattgcgtttcatattctctgggtatacagttaagtttttaacgatattaccaaagcgatttaacatgtaatttaacgcgattgtagcatctggtaaaattacgcgttctgccgaagagtgagaaatgtcacgctcatgccataatggaacattttcgtaagccgtcatcatataaccgcggataacacgagctaaaccagtcatattttcagaaccaattggattacgtttatgtggcattgcagaagaacctttttgaccttttgcgaaagcttcttcaacttcacgtgtttcactcttttgtaaaccacgaatctcaactgccatcttttcgatagatgttgcaattagtgcaagtgttgacatgtagtgtgcgtgacgatcacgttgcaatgtttgtgttgaaattggtgctgcttctaatcctaagttttcacaaacatatttttctacgaatggatcgatatttgcatatgtaccaaccgcaccagatagtttaccaacacgaactgtatcagcagcttgtttgaaacgctctacgttacgtttcatttcttcataccaaagaccaagttttaaaccaaatgttgttggttctgcatgaacaccatgtgttcttcccatcatgattgtgtatttatgctctttcgctttgttagctaaaatgcttacaaagttctctaagtcttttaatataatttcattcgcttgttttaagatgtaagataatgctgtatccactacgtctgtagatgttaaaccgtaatgaacccatttacgttcctcacctaatgctggcgtttctgatacagcacgagtgaatgcaactacgtcatgacgtgtttctttttcaatttcataaatacgatcaatatcaaatgatgcatgctcacgaattttcttaacatcttcttttggaatatcgccaagctcagcccatgcttcacaagctaaaatctcaacttctaaccatgctttaaatttgttctcttccgtccaaattgcacccatttctgggcgtgtataacgactaatcatctttttccctccaacagttgttcttgatggtcccaaatatgcaaactcttcgctttttctagagcgacttcaatattatcatttaaaatattaacatgccccatttttcgctgtgcttttgcttcttcttttccatacaagtgtaaatagcacccggttaatctattcacttgtcttaggaccccttctatatgttcgcctaaaatgtttaccatgacaactggttttaacaaatttgtttctcctagaggtaaattacagattgctcgaatatgttgaccaaattgactcgtctcacatgcatcctgtgtatagtgtcctgaattgtgaggtcttggcgctaattcattaatataaatctcaccattatctgtagcaaacatctctacagctagtgttcccacaagttctaattcatccgcaagtacttttgcataagcaattgctttttgagaaagctcttctgtaatgcgagctggaacgatagattcatgtaaaatgttatttacatgaatattttctgctactggaaacacttttgtttcaccacttacactacgaatcacaataactgatacttctttttcaaaaggcacccatttctctaaaatacattctgctttatccacaagatttcttgctgtctcaacatcagcttcacttcttaaaacaacttgtcctttcccatcatatccacctgtcgtcgtttttaagacggaagggaatgataactcagcaattgcttctgtaagctgatcttgattttgaactaatctatacgttgctactggtaacccagccttctcaatcgcattcttttctgtaaaacgattttgcgttgtatttaacaactgactaccttgtggtaagtacgcatgtttttcaagccattgtaaacatctataatcaatattctcaaattcatatgtgacaacatcacttatctctgctaaatgctgaattgcttttaaatcatcatatggtgcaacaatttcaatatcagcaacttgtgcacatggtgaatgctttgtaggatctaaaacagcaattttatatcccatttccttagctgccaatgccatcattcttcctagctggccgcctccaataataccgattgtttttccaggtaaaatgatcctcgtcatactagctcactaccttcacgcacatctttttcaatcgcttctcgtctcaattctaatgcatcatgtatatcatcatggaatgatccaagtatttgtgcggcaagtaatccagcattcgttgaaccggctttaccaattgcaacagttgcaactggaacacctcctggcatttggacgatggataataatgaatctaagccttttaatgcttttgattgaactggaactccaattacaggaagatttgtcttcgctgcaaccattcctggtaaatgtgctgctccaccagctccagcaataataactttcaatccacgttcacgagccgtctctgcatattcaaacatataatccggagtccgatgagcggatacaacttttttctcatacggtatatttaattcatctaaaatgtcacaagcatatttcattgtttcccagtctgacgtgcttcccattatgactccaactagtgatttcatattagaatccccccgattcaaataaaaaaagcctgaaatagaacagtttctcttttactatgagagaaagcgctctactcaggcatacgtatcccttgtgaatagaaaaataccgagtgactttccctcatagtctaacgaataacggtcgttaggtagagacttgcaggccatatccccgcgattatatgaggtcttatattattgtttctatggttatattaacaatatttcataaacaatgtcaataaataatcgaatgtttttttattagtagtcaataacgttcgtgttttagttatattcaaaagaagaattgcaactatatgcaagaagaaaagggaattagaatatatatttctagagatctattttacgtataatcgtttaaatggcacttcagtatgttttaaatcaaaatatatacactcttgtattattataacgatttaatttctaaagaggataactgttaaagaaagaactatgctattatcctatttatttttctctattgcagtaatttctgtaattattaaatacttatttatagcatctcattatttaaaatatatacttatgatagtaataatttgtcctattttaagtattactttagtggcattaggaaaatcaggaacacaaaaaatcattgctattattttaaacagtctctatttcattcttttttcgtctttagctttattaaatttatggattatagccttcggtaaataaaaataaacacaaaaaaacctaagtcgaaacgacttaggtttttgcttggcgacgtcctactctcacagggacaaggtcccaactaccatcggcgctagagagcttaacttccgtgttcggtatgggaacgggtgtgacctctctgccatcatcaccaaactattgaaggcatattccttcaaaactagataacatttgctacatattatatggttaagtcctcgatctattagtattcgtcagctccacatgtcaccatgcttccacctcgaacctattttctagctagctttttagaaagaataacgttttttgacacttgggggtagtgcaaattcttaagttgatgggcatgtatggtgactccttttagttaaattatctcaaaatgccgaatttaaattagtttagccaaatggtatgattcaaggattcgaaatcactttaaaattgctatatttcttaaaattcctttccatttggattataatataattatcaataatttgttatgaaatagaaaatgaaaaccaactttcttcaaaaagtattatgattgtaaagtagaagaaggaattacaaaaaaaggaaatgatacaaatgatactaaaaaatctgcaaataaaggattggaaccaatttgaaagagttgatattgattttcatcctaggttaacggtcttgactggcgcaaatggtgcgggtaaaagtacaattctaagaatgtttagcacacagcttggctggggctataatgaaacggctataccatcgaaagaatctactacatctttgaaatataaaagtggtggtagaagaaaaattcaacctagagagcaacaagataagataaatattgggagtttagagtgttttaatggtaagactgcaaacctatttgttccagatttaactccttcagcaaattattgtataaattatgaaactcctggtctcaattactatactaataattctttagatttaaaaggtatcaatattccttctcatagaatagcgtattcttataaaccagttggaaacattcctgtaagacctgcttctagagaagaagcttttagcttatttaaccactctttaatgaataaattatttgaaagttatggagattccccttcctttcaaatgaaatcaacacttataagtttagctctatttggtgaaggtaattcgcatgttaatgaaaataaagaagcattagatttatttttaggatttatcgaaatactaaaagtacttcttccaccaacattgggttttaaaaagatttcaattagagatggtgaagtggtattagaaacaaatagtggggatttcttattagatgctgtttctggcggtataggtgcaatattagatttagcatggcaaatctatatgtatgatggagataaatacgagccatatattgtattaattgatgaggcggaaaatcatttacatgcttcaatgcagagaagattaatgccgagtttacttcaagcctttcctaatgcacaattcataatttctacacatagccctttaatggtaaactctgtaagagattcttccatctttgtgctaaaatataatgaaaatcatttagtagttagcgagttattagacttcgaaaataaggcgtcgaatgcttcagaaatcttaagagatgtattaggtgtccctataacaatgccactatgggtagagaacaaattagaagagattttaaagagttttaaaggatacgaaattacacctgaaagttatagtagactaaaagatgaacttgctacagttggattgagagatcatttgcctcaggcattaggaatccttcaaggaggtatctactaatgatttctttaataaaatcgtccaaaccgacaatcctggtggagaaagaaatcaattggacaaatgaattgttaagttttgaagaatctggtgaaaaagtacctaattatattaaaggtagatatcgtcacgaagaaatcaaggaagcattattaaaagaaacatattctaaatgtgcatactgtgaaagtaagatacttcatatagattatggagatattgagcatataatacctaaaagtatcttccctcaaaaaacattttcgtgggataatcttacaattggatgtgcaaaatgtaatcagagtaagagtaattattatgatgatactttaccgttacttaatccatatattgattcccccgaaaatcaaataatatttcaaggacccattccttttgcaaaacctgaatgtagaagtgcatataaaactatcaaacagttaaagcttgatcgaattgaattaatcgaacatagaagtgatttaataaaaaaaatccaacccttaatttggcaatatgagaatactgaggacgatatgttaagaaaaatgatattagatgatctaaaatcatttactaataaggatcaagaatactcattgatgataaaacaattattagattctcttgctattactgcataaaatatttaaaaacatgcaaaactgtaaagagccttactacaaaaatgtaacaaggctcttatattttatattgtgttcattatgggagttttattgattttcaaattatgttttaatatttttcattaaaatgctgttagcatataaaaatcgtttctttcatgttaaagtttgctgttcatgatttccttcaattttttggtctgtaatttctccattagattctagaatttctagatatttctttaaaaatccctttttatcttggcctgaaacctgtctattagattttaaaatatttaaacatttctctaagatttcctcattatcaatgataacaatgtgcagtttttttctagcccttgttaccatctgatagagcatttttatattatcataatagtaatccttcttacttgttaatagatttttataatagataaaatgagaatctattacaacaattacattatcaaattcctgtccaataaccttatgtgcacttttatcttgcgaattttgataaaattcataatgataagtcttatgccgacttggtgtataatatatcgcttcccatccattattttacttttagcattaactaaagatactaaattaatatgttccattttaattcttcctcccgtagtaaaaaaatcataaattcaatatgtttataaaaacatataaattaatatttatttttatgaatattaatttttttaatatacgaagctattcgacatatcaaaacgagcttttcaaaatatacaaaatgttaaaatcatagaacctagtaatgttaagcaaacatactgatatcactggatttttatttggttatttaacgacggtttttgcgaattgtaaaaataattttaattttgtagttgaattttcccaaaaagtgatatttcaaattatgctaatgaattggctaatcttagctgcaacttgggagtaatgagcaaccattgagttaatatcagttaaagccgcttttactcgtctaagaagagagggttttacagctgcaccttgctctacattttgtgatatttcttcaacaaaatctaaagtagcctctttaacatccgagctctctatagatatctcttttagtaattctatttagtagaatatttccctgtatagcatcattattgagtcctgattccatacgtttgaagttaagatatattgaaaagatcttattgagatttcttgtcaatttctcataagttttcagtttattcggaaatttagtggttttagttttacagtttcgtgaaatagtgggtttgaagataatataaagtgtctgtaggacaatagctatgggtataagataaaaatattgtctgtacatatcaaaacataacagaaaatcaacaacatgaacggaaggataaacagtactgtagcatatgaacttatttggtctgtcttaggagtagtacaatgcaaaattgtaagtcagcaatcctagaaataagtttgccttcggtaggaagcgttccactaacgatgttcatcctcaatattttcttaaaacgtttgaaggaatttagtttatgtatataactttatgaagaatattaaatctgtagtatatgtaattcctcttgaatgaattcacgtatagatcctcatctaaaataaaaaatttcgcatataacttcattgatgtttaacgtttaaaagctcaacatagatgatttatagagaatgcaattataaatgcaagaaaatctaatttaaaattgaaaattcgttctattttggttagatatggaataaatgaattttatttctcaatattcactgtatgtcacttttttgtttttttctatatgatattggaaaaagtatgcttaatttaataacataaaacccctacaaaattattactctacaaattaatttcttaaagaaaacttcttgtgaatatgttactaactacataaagtgtaatattaacagaattattaccaaagtattaggtttttagaataaaaatgagtgctcaaaatatcattgaaatccaggaatagaaatcgtaattaaaattttttgttttctgtcagatatgtaaatcactttagctactttatgggtaatttcatgtgttttttcttttgcttaagtttatgaaatagaagtattagctctaaatattgtagctaagagtatgtaaagcatagaaaatccgaattaaacaaaataggaggaaagtgaaaatgaagcatcaagatgatagtaaaactggtttggaaatagcgattattggaatggcaggtaaatttccaggtgcaaatgaaataaaccaattctgggataacctaaaaaatggtgttgattcaatttctacatttactgaagatgagttaattaaagaaggtgttaatttagatgttttacaacatcctaattttgtgaaagcaaaagggtatttggaggaagtagaatattttgatgaatccttttttgcttatacacctagggaagcgaaaataatggatccccaaatccgtatgttacaggaaacgacatgggaagcattagagatggcaggctataatccatttgattatgaaggattaatagggttatatgtaggagcatctactaattttaattggatgaagcacacgccattattaaacagtgatagtgtggttgagttttcagaggcaggtactctttcctataaagatgcaatttcaacgcttacatcctataagctgggacttaagggaccgagttttacattatatacagcatgctctacatctcttttgagcattcatcttgcatgtagatcattgttaactggagaatgctctattgcagctgcaggtggagtatctataacgtatcctaaaaagaatggttataaataccatgaaggaatgacaagttcacctgatggtaaagtgcgtacttttgatgcagaagcccagggtgcagtttttagtgatggtgtaggtatggtaatactaaagagattagaagatgcgattgctgatggagatacgatatatggtgtaattaagggatcagcagcaaataatgatggtagtcgaaaagtaggctatactgctccgagtgttgagggacaggctgaagtaattcaagcagctcatagttttgctgaagttgatccttctacaattagttatatagaaacgcatgggacggcaacgccattaggggattctatcgaagtagaggctctaaagagagcgtttcaagatgtggacaagaaatctttttgtgcaattggttctgttaagagtaatgtaggtcatttagatacagctgcaggggtgacgggacttataaagacagttttatctatgaggcataaacaactcccgccaactttaaatgtgaagcgccctaactcgaaaattgattttatagatagcccattttatatcaatactgatttggtgaattggcaaagtgaagataatgatctccttcgagcaggtgtgagtgcttttggatatggtggaactaacgttcatattgtattagaagaagcgcctaaagttaaaagttctgcttctactagagagaaaaagttaatggttctttctgctagatcaaaagaagctttaaataatgctacagtaaatttggttcaatatctggaatctaataaagatgttgaattagcagatgtagcatacacattgcaaactggccgtcgaccatttccgtatagaagagcggtcttatgtaaggatatagatagcgccatagacaatttaaaaacagttaaagattttcacgtgaaaatacaagaaaatccagatttggtatttgtgttacctagcgaatactcatcaattattgagaatgtaaaagaactataccaaaaggaaccattatttttacaagtatttgagcgtaatatgactgatgcccaaatgtatactggaaaagcattgaaagaagcattctttaaaggaacagatgatagcttggttgaagatttaaccttcttcgtctgcttgcaatcgattattgatgtattaattgaatgtgatgtacgtccttctaacattattgatacaggcctagctggaatggtttcagatatttataataaatctcttaagccagaagatgtcctgaatcaattagttgagaactatacagagttacagacagaatggatgcatggagaaaaagtagaacttctaacacaagttaaggatgtaaatcctaattctgttattgtacatattggagagttattaaattctgaaattaataataatcagattattttacgaaacgacttgttagaggtattgggacaagcgtgggagctaggggtagaaattaattggagtaaactgtatgaagaggaatatagattacgtattgccttaccaacatatccttttgagaaaaagcgatattggatagatccagctgaacagcaaaatataactaataatgaagaaacatcgataaagaaacgttctaatatagctgagtggttctatactccagggtggatggaaaaagaaattgtagatgtaactaaaggatctactaaaagttggttgttatttttagacaatgagcatataggcttagctcttaaagaaaaacttgaaagagatggacatcgtgttataacagtcggtgtgggtccttcatataaaaagattagtttaaatgaatttacaatatgccctactgaacaagaagattattatcagttatttaatgagctacaaaaacaagaatgtttaccagaggagattgttcacctatggaatgtcgataataaggatttaggtatcgagaccttagatactggattctattcattaatatcacttgcaaagacaattagtaaatttaatttactttatcctatcaatataaatgttatgacgaataatatgcaaaaggtagtaggagacgagtctattattgcagaaaaatctactcttttggctcctataaaagtatttccgcaagagtatccaaatattagatgccgtagtgtagattttatgttgtctgataatgaagaagcattaatatcaaacttatattttgaaattcaaacggacattattgacactgtaatagcaattcgaaataacactcgttacattcgaatctatgagcctatacctgatgaaaaagtaagtgaaatgctagtaataaatgaaaatgaattagcttcaaaaattccgaatattcgatcggaaggggtttatttaattactggtggaatgggaggagtaggccttaaattagcagaatatttggcgcgtacagtaaaggctaaactaatattagttagtagaacagctcttcctgatcgtgaagaatgggatcagattcttcacgagcagattgaaaatgaacaattatgtcaacgtattaaccatattcagaagttggagtcattgggagcaaaagtaatgacagctgttgcagatgttgctgatgaagagcagatgagaaacgtgattcatcaggccgaggctaattttggtcacataaatggagtaattcatgcagcaggtgtcttacgtgttaaatcagctcagtgtccaatggaaaagataagtaggattgaatgtgaagagcaatttcttcctaaagtacatggtgtgctagttcttgataagttattgagtaattatgatcttgatttttgttatcttgtttcatcactttcacctattttgggtggattaggttttgtagcctattcagcagcaaacctttacttagatagtttttcagacaaagtgagtaatacatctaataatcgatggaccagtattaactggggagattggcagtacacgggagctcaacaggttaataaaatattcaatgctcaaagtatagaagcgcttgaaatgacatctgaggaaggacaaaaaacattccaatgtgtgcttggtttaagtggtttaaatcaggtaattatttcttcaggagatttaaataaacgttttgatcaatggattaatctgaattctcgtaaacgaatttctggattggaaactcaaactcaaacgaaaacgggagataagttcagaaatcaagatgaagtagaggaaataattatagggatttggaaagagttttacagtgttgatactgtaaatgtaaatgaaaatttctttgatcttggtgcaacttcacttcatataattcaaattcatgagagattaattaatagattagaaaaacagatttcaattggagttatgtttgagtatccaagtattcgttctttagcgagatacttaagtggagataagcaaaagaatcaagttaaacatacaaaacgttttaatcgaaaaacgaaagaagataacgatattgcaattataggaatagatggacgttttcctggagcacagaatgtaaatgaattctggaataatataaagtctggtacagagtctattcaattttttacagatgaagagttaattgaatctggtgtgaatcctatggaagtaaaaagccctaattatgttaaagcgaaagggtatttggagggtactgataattttgatgctccattctttgattatacacctcaagatgcatcattaatggatccacaactacgagtattccatgaatgtgcgtggtctgcccttgaacatgctggatataatattgagacctacccgggcctaattggtgtatatagtggggcatctcctaacttatattggcaagtgttatctactctatcagaggcaaatgaaccagctgggcaatttttaatttcattacttaacgacaaagactcgcttagtactcaaatttcttacaaatttaaccttaaaggaccaagtatgaatatctttacgggatgttcaacatcattggtggctattcataatgcaagccaagcattattacaggggcattgtgatattgctatagctggaggaattacattaactcaacctgaaaaagcaggttatacctaccaagaaggaatgctattttcttcagatggtcattgtcgtccttttgatgaaaatgcaaatggaatgctttttggagacggtgttgggattgttgttctgaagcctttacaggaagctataaatgatggggatactatacatgcagtaataaaaggaacggcgattaataatgatgggaatcggaaaattggttacactgcacctagtgtagagggccaagtagaagttattaaaatggcgcaacatgaagcaaatgtagaacctgagtccatttcctatattgaaacacacggaactgctactaaactaggagataccattgagatcaaggcgcttagtgaagtgtttaactctaatgaaaaacaatctgtaccaattggatctgttaaagcaaatgtaggccatctaaatgcagcgtctggtgttgctggtctaattaaaacggtctttgcgatgaaagatcaggttcttccgccaagtgtgaatttcacaaaaccaaacacgcaaattggatttgaaaatacacctttttatgtaaatcaacaattaaatgagtggaaagaggataataaaccattacgtgcaggtgttagttcatttggtattggtggtacaaatgcacatattattttggaggaggcaccaaagcttgaagcaacctcaaatagtagaccataccagatgttaatgatttcggcaaaatcgaaagatgctttggatcgtatgactttgaatttaggaaatcaccttgaacagaatcctcatttgaatttggcagacgctagttatacattgcaaattggacgtaaggaattcaagcataggagagctttagtttgttccagtactcaagaaggaattgaacaattaaaccagccagacggaagaagagtacaatatgcaaatgtaaaagaggaacatcctaaaatcaacttcctgttttctgggaacggatcgcaatatgtaaacatggggttagaattatacgaacaagaggcaattttccgtgaagctatggatgaatgctttgcaatccttcaatctgttacgaatgtaaacatgaaagaagtgttatacccaactactttcagtattgatgaggcgacggaaaaattaaaaagaatggaatttagtcaaccaattcttttcgcgtttgaatacgcagttgcgaaactattaatgggttggggaattaaacctgaagcaatgattggatattcatttggtgaatatgtggctgcttgtttagcagaagtatttactttagaagatgcacttaaattggttgtaaaaagaggtcagctaatgagtagtcttcctgcaggagtaatgcttagcgttccacttccagaagaggaattaattcatttgattaattcttttgaaaaagaatatcaacataccatttctttagcggtagttaatggccctgcttgtatagtttctgggacagaagaagcaattgtagattttgaaaatgaattaaagaaaaagcgtttaatgtgtatgcgagtaacaatagaaggagcagcacattcacacgaactggattcaattctggacgagtatgcttcctatgttagtacattgacacttagagaacccaaaataccttatttgtcaaacttgaccggtacttggatacgacctgaagaagcaacaaacccagtttattgggtaaaacatatgcgtggaactgttcgattctctgatggaattcaagagttgaatagggacaatacaagtctattcatagagattggtcctggaaatgaccttagtaggcttactagtcgccttttagactatgaaaatggtaatgaaagaatatttaatacggttcgatctgttcaacaagatgtatcagatatgtatttcttattcagtcacatcactcgaatgtgggtaacaggtatttctgtagattgggaacaattttataaagatgagaagagaagacgtatcccattaccaatgtattctttcaataaaatatcttataaattacaaggtaatccgtatgatttaggtcaaaagcttaatagtaagcaatctaaaattagtaagaataacaacatttctgaatggttctatacgccgcaatggaaaagttctacattgtttgaaccaaatcatgatgtgaatgagacatggattgtttttgtagatcaagaaggtttaggtaatgaactagttaaggacttattaaataaagggcagagagtagttacagtagaacctggctttgcttttaataaggagaataacgatcgcttcattataaatcctgaagaacgtacagattacgttaagttattggatgaagtacaagaaatatatggtttacctacaagaataattcatatgtggggaattaccaatgaggaaagacaagcctcaattgaatatgtaaattgtaaacaaaacttaggattctattcaatgttctacttaactcaggcactaggagacaagaatatctctgattcaatctcaattcgaatcattacaaatggtgttcaacaagtgattggtgatgaagaattaattccagaaaaatcaactgtacttggaacgtcattagttgttccgcaagagtattcttatctttcttgttcaagtgttgatgttgttttacctctaaacaaagaatggaagaataggttaataaatcaattagtagaagaatgtctttcaaatacgaatgataagatgattgcttatcgaggaaataaaagatttgttcaaacttacgagcctttacaactagaacagccagctaaagagaaactgcctttacgaaaaaatggagtttaccttattacaggaggactcggaggtattggtacaattcttgcgaaacacttggctcaaactgtacaagccaacttagttcttcttacacgtacaggtctgccaaatcgtgatgagtgggatatgcatttgaaggaaaatacgatgtattcggacagaattcgtaaagttttagagatagaagaaacgggatctaaagtttatgtacttgctgctgatgttacagatcaatcacaactatacgaagcaattcataaggcagaacaaaaatttggaaagattaatggtgtaattcatggtgcaggtattctcggtggaaagacttttaatttgattcaggaacttgaaaaagaggactgtgaggaacaattttctgcaaaaatttatggtcttctcaatttagaagagtgcttacgaaataaagacttagatttttgtgttctaatgtcttcaatttcagcggtcttaggtggattaggttatgtttcatacgctgcttcaaatatatacatggatgtttttgcacaatatataaatcgttattccaaactaccttggataagtgtcaattggagtgattggaaatactgggaagatgaagaaaaagatatgcaaataggtgcaagtgtacatgaattatctatgacacctgaagaaggagttcaggcctttaatatagcactgtcatggaaacaaggggaagtactgattcattctccaggagaactgcaagcgcgtattgatcaatgggtgttattaaattctttcaatgatgagaaggaagaagaattagattctacgttataccattctagaccacaactcttgactgaatatgtagcacctcgcaatgaggtagaagaaaagctttcaaaaatttggagaaatatatttaaagtttcagaagttggtgttcatgatgatcttctggaactaggtggagattcacttaaggctattactattgtttcaaaaattcataaagagtttaatgttgaagttcctattaaagagctctttactctatcaaatattgagaaactagcaaattatatttcaagggcagataagagtgaatttgatgttattgttccagctgaacctaaatctcattatcagctttcttcagctcagaagagattttatgtattacaccgattgtatccagaaagtacagcttataatgatacttccgttattcttttgaatggaaaattaaacattgaacgtttagaaaaggcgttcactcaattaattaagcgtcatgagatatttagaactactattgaaatgaaaaatgataaaccagtacaaattattcatgatcatgctgatttccatattactcaaattgagggctttgaatctgaagtggaacaaataattaatgaatttattcgcccatttaattttaataatgctccatatttccgtgtagggttaattagattggaagaacaaaaacatattttaattattgatttacatcatatagtaaccgatggagtttcctatgatatttttgttagagatctatttgcgctttactcaggagagaaattaccaaacttaaaaatacagtataaggattactcagaatggcagcaaagtgaaaaagaaaaagaaattgctctcaaacatgaacagtattggctagagcaatttaaagatggtgtacctgtcttgaatatgcctactgattatacaagacctgaaatattagatctgaaaggtagtaaaatatcctttactattgattcaaatgttaccaagaaaattaagcgtttattagcaaaagaagaaactacattatatacgctgatgctctctgtatataatattttgctaggtaaatatactggccaagaggatgttgttattggttcaccaattactggtcgcccgcatgcggatttacaagatattataggagtatttgtaaacatgttaggaataaggaactatccaagagctgaacaaaggtttactcaattcctatttgaagtaaaagagcaggtcttacaagcatttgaacatcaaaaatgtcaatatgaggacctggttaataaattaggacttcagggcacgtataataggaacccacttttcgatgtttcatttgttatgcaaaatatggatgcagatcatatgtttatcgatggtttagaactaaggacatatgatcacgactttaagcgcgcacaaatggatttattgctaagagtggttgaattggaagatacaattgaactgactatggaatatgcaacctctttatatactagggacacggttcaaaagttatgtgagcgttatgttgagatttttgaacaaattgtagatcatcctgaaattttattaaaagatatttcatttaaacaagaaattcaagaactgcaaccagttaaggtatcagtagattttggggattttaacttttaattgattattgtcaggagtgagtaactatggttgaacgaatagcaaataaagataaagtaattgccgcaaatgaacgaataaaggaaagagaattttggttagaaaacttatcaggggaactggctgactgccatttcccttatgattaccggacatcaaacaaacaggtgaatttatcaaatgttaacataaaactaaaagaggaattgtccgagaagattttaaagttagcaaatggatcagatcttcagttgcacatgattcttactgctggacttaccttgctgttaaataaatatactagattgcaagatatatgcattggtacacctgttttaaaacaagacagtgatactaaccttattaataatttgttagttttaagacatggtcttgaggaacatatgacatttagacaaattctccagcatgttagtacagtaatggttaatgctttagaacatcaaaatttcccattggaaagtttacaaccggttttgagtaactaccttccagaggggcgtaattatccgttccgtactgcaattttgctagaggaaattcaagatttaaattatttaagtgagagcaatgctgagattatattctctttccgtcaagtaaatgggtgtatagaagttgatatgtattttaatgagcatctatacaaaacatctactgttatgcgatttggtcatcattttatagacttgttagagcaagctttactacaaccgaatacgccgcatatagatttagattgggttagtgataatgatataagagagttaatcacatttaatcaaactgagttagattacccgcatcatttaacggtgatacagttatttgaagaacaagtcatgcataatccaaataaacttgctgtttctgatgacaaaagagaaataacatacgctcaattaaaagaaaaggtagatctggttgccagttctctacataaaaaaggaattggaaaaggacacattgttggccttatgatggatcgatcaattgatgcagtaattgcattgctaggtattttaaaaagtggggctgcttatttacctattaacatatatttgccgtataaacggatagaggcaatgctaaaagaatgtaaatctccactttgtatagtaaaaccagaagttattagtgaagattttacaagggaaatccaggattgtagtatggtaagttttaatgaactacttgaaacagaattggttagtttaccttcagtaagtacaccttacgatttggcatatgttatctttacctctggaacaacaggtaatcctaaaggaattatgattgaaaatcgtagtgttgtaaatttaatattcgggttaaaaaatgaaatatatgataaatatagttcctctatgcgaatcgggttagtttcaccttttgagtttgacgcttcagtacaaaacatgtttggtgcgcttttattaggaaatagtttatttatagtaccagaggaagcaagaactgatgggcagaagctaattaatttttatcaagaaaagcaaataaatatcgcggatggaacgccgatgcatcttcgattattaactaattttatagatgaaaaaatagaatattcatttaaacattttattattgctggagaggaattaccaccgaaattagcgcggaaattccttggtttatttaataagaactgccaacctaatttaacaaatgcttatggacctacggagactactgtagattctacatgttatcatgttcagcacgataagttagaacttatgaatcaattaccaataggacgacctctagccaatcaaaaagtttatattatgggtgataatcaacaattacaacccgttggaattcctggagagttgtgtatttcaggagaagggctagcaagagggtatttaaatcaacctaagttaactatggacaaatttgttcctatacaaatcaccaaaacaggttcttctattatagatgacaaggtatatcgtactggagacttggctcgctggttaccagatggaaatcttgaatatttaggccgtatggatgatcaagtcaaaattcgtggattacgaattgaattaggagaaatagaaaagcaactattacgatatcctgaaattggtgaagctattgtaattacacgtaaaaaagagggagaagatgctccggttttatgtgcatatgttgttatgaattcttcagctaaagtagaagaggtacgccaattccttagagagtatttacctttttatatgattcctgcatacatcatcccgattgagcagtttccaatctcatcaaacggtaaaatagatcggaaagctcttccagatccaatttgggagcaatccacagctttatttattgaaccacgtaatgaaattgaacaaatgctctctgagatatggaaagtagtaattggaatagagaaaataggtgtgaatgataactttttcgaattaggaggtaattcattacaaattacttctgttgtttcacacatatataaacgtttaggtgtagatgtacctatacgtgaaatgtttcaaaggcctacaattatgctattagcggagtatatagagaaatatgaagggaagaaaaattattctcaaattgagatcgtacctgatagagaattttatcaaacttcttcttcacaaaaaagattatatatattaaaccgctttgctggaataggaactgcctacaatataccaggtgcaatgttaatagaaggtgagtttgattttataaaggcagaacaatgtgtcaaagaattagtagaacgtcatgaatcattaagaacttcattccaatttattaaaggtgaaccagttcaatttattcatgatagtttagatattagaattgaacatttatataaatctgatagatcaacaattgaagagctaatacaggaatttgttcgtccttttcagttagatagggctccacttatgcgcgtcggtttaatgaaattagaattcaatcaatatctgttactatttgatcttcatcacataatagcagatggagtatctttagcgaagttagaaaaagagtttatagatttatattcaggcaaagccttagagcctattaaaatacaatacaaagattatgccaattggcaaaccaaccgtttacatgatgaagggctgaaagaaattgaagagtattgggtagagaagtttaaaggtgagttaccaattcttatgttcccaaccgataagccacgtgggctaaatcaaacttttgaaggtgatagattagtattccatttaacacctgaactttctaataaattaaaatcctttgcggatgaaagagaagctactttatatatggtacttctttcgtcactaaatatagtattgcatgtgtatacgcaacaggaagatattatagtaggttctccaattgcaggaagaattcatcatgatcttgagcctatcataggtatgtttgtaaatactctacctatgagaaatcatcctaaagcggaaaagacgataattcaattcttaaatgaagtaaaagaaaatgcgctagaagcatttcaatatcaagaatacccatttgatgagttagtaaataagttagacatggcttatcatactaatcgaaatcctgtatttgatgtcatgttagtaatgcagaatatcggaagaacatcagaaaaaataaaagatattacatttaaatcatacgaaattaagcatcaagcttcaaaggtagatatgagtatagaagtatttccggaagaagagggtctgcgattagaattggaatacgcgacaggactatattatccgcaaactatagagcggtttatgatgcattttataaatacgctagagtggatggtagctaatcctgaagcgaaaattgaagacgttaatgttttaagtaaaagtgaatccacaaggatgttaaatgaacttaataatacaaaattagattttactcagggtaaattagttcatcaattttttgaggatcaggttgaaaataaaccagaagaaatcgcagttatttcaaatgatataccgtacagttattcgtatatcaataatcgagcaaatcagcttgctcgtattcttagacaaaaaggtgtagatcaggaaactaaaattggtatcgttgtggaaagatccgtagaaatgattatagctatatttgctgcgctaaaatctggagctgcatatgtaccaattgatcctgaatatccaaagcgtcgaatggaacatattttagaggattgtaatcctcaatttgtacttacagaatctaaatacgtaggtgaaattccatttgtaggagagattattgatttaaagcaagaaaatttgtacgttggtgatacaagcaacctggaagttgctggaaaatcaaataacttagcttatattttatacacctccggttctacaggtagaccaaaaggagtcatgattgaacattgtagtattgtgaatttcttattttcaatgtctcatttatatcctatggatgaatcagatacgtatttactaaagacaccttatatatttgatgtatctgttctagagttgtttgggtggaccatagtaggtagtaaattagtaataatggacaatggggaacatcgaaacccaagagcaattttaagaactatagataaatatgatgtgaaattattaaattttgtaccgtctatgtttagagctttcgtaaatacacttaataatgaaaattgccaggttttaaataaagtgaagtatatattacttgcgggtgaagctttgacacatgaggtggttaataagtttaaaaagcatcgactatcgactcaaatagaaaatatgtatggtcctactgaggcgacagttatcgcaagtacgttttcacttcaagaaagtgaaaactataatactattcctattggaaagcctattccgaatgtaaggctttatatacttaatcaaaaacagagacttcagcctattggcgcggtaggagagctgtatattgcgggagaagggcttgcaagaggatatgtaaatcaaatgagattaactgaagaaaagtttttaccagacccatttgtaaaaggggagaaaatgtacaggacaggagatctttcacgctggttacctgatgggaatatagaattcctcggtagaaatgatgaacaattaaaaattagaggatatcgaattgagccaggggaaattttagatgctttatcttcacatcatgcaattaaagaagcagtgatagtagacattcaagatgaagatgggcagaaaaaacttgtagcttatttcgtagcaaaatcacctgtatccatttctgatttgaaattgcatcttgctaaattagttccgagttatatgatacctactttctttgttgaagttgaaaacataccattaacaccaagtggaaaggttgatcgacattccttaccttcacctagatctttacctaagaatgaggaggagagtatgatgtctcctagtaatgagttagaatctcgtttggttgaaatatggaaaagtatattgaagattgaagctgtcggtgtagaggatgatttctttgacttaggaggaaattctctactagctattgagcttgatcttgctttagaaaacgagaatcttaatacggacgacttagtcgcatatacaaaacgcaatattaaacaactagctgcttatatagcagaaaagaaaaataattagtattacttcatattgtaaacacgacttttaagagtttaaatttacacttgctatactgtgggattaaaggagctttccctcttagctttctggaatgttagtgtttattctggtgactatgagttagggaattctcctccttattatagaatgattaaaataaaaaagtgattcgagaaataagattctttatatgaaatgcgttaataataattgatagatttttaaagaagatatacatatctctgtcaacttagtatagagaaataaccaaattacaatagtttttcctgttggtaaaaatatagaggtgagtaaatgggaaattatacttcttcaatcttatatgatgttgagccttgtaaaagttctgaacagaattgtattgatgatgtaattgctacgttagctaattggtttaagcgtaaacattatttaatgtacgctagattatgggattttggtttttctcctgtcgataatggaaatctaggggatggtttatatacagagtctggttattttgtaagtgatttagaaaaatatcatggtataaaaagtactatatttgatacagattcatccgatgaaggatttgaaattatattagaacaattatactcgggatttcctgtggtggtaaccatgaatgcatactggcttccttgggatgagaattatctaaaaaatcatattgttcattcatttgttattgtaggatatgagcccgaagaagactgtttcattattaccgatccatattttatggttaaaaatgcacaactttcaacagaactttttcataagggttatcaaaaagtaagtactttaaaagttactgaagatgaaatcacagacatacaatcaattacaaccgatttgtcaaattggataaaacatataaaagatgaaaaacatattttttcacaaatgcacctttttgctacgaaactaataagtaggtttgatttaaataaagagacagatggatatttagactttaatgatgttccgttattctcacatttaggtcaagttgtagatggccgagtgaagttttcaaaaatgctttcgtttcttggtgagcgttatcactcggacttccaaactatcgctgaatctatgaagacagcagctgctaattggggagtaattcgtggatcattgataaaaatgcacttaacaaaatcagtaactaaagaaggaatagtaaacatttcagataaaattcaccatgctgcagaatacgagcaaaatttagctgaacaaataatgacatttcttgtttctgttataaaaggtaatacaaagaatgtaatcatagattcttcgccatcgatagaagagactactaattatgtaaaaccactcgataatatggagagaaagctagttgatatatggaaagaagttataggtaatccttgtattggtgtggaagataattttttcgcacttggtggtcattcccttcatgctactgtaatcaacgctaaaatatggaaagaatttaatgtgcaattatcattagcaaatctttttgagtatccaacaataagaactttaagtcattttattaaaaattcaaaagaaaataggttgcaagagatagaaatagtaccggaatctgaggtatacccggtttcatcgactcaaaaaagaatgatgttactacaagagatggatggggtacagatgacatacaatgtaccaagttgttttattcttaaaggaacggtggatcggaaaaggatagaattagtctttgaaaagcttattaaacgccatgaaatactcagaacacagtttgagtggcagggggatcaattagtacagagagtattagaacaggtaacatttgagctagaaatgataaagggagattataaagaatggttgcaaccatttaatctttctaaggttccgttaatgcgggctggactaaaggagctaaaagataatagttatttacttgtaattgaccttcatcacatcataacagatggcgtgtctttaagtatctttatgcatgattttaaggccttatatgctggggaaacattgccggaaaatcgtttgcaatataaagattatgctgtgtgggaacaaaaattattatcttctaaagaatttgatatccatgagaaatactgggaagaattattctcaggggatataccagttcttgaattaccatatgatcgaggtcggccacctgtaaagagttttgagggtgaacaatataatttccaagtaaacaaggaaattactcggaaaataaaaaaaatagcactagaaactgatacgacaccttttatgttacttatggctaccttcactatttttctgtacaagcatggggaacaaaaggatgtcattataggatcaccagttgcaggtaggccgcatgctgatctgttacctcttatggggctgtttgtaaatacaattgcattacgttatcaaataaatccagatcaatcttttattaatcacttgaaaaaagtgaaaaacgatacgttagaagctttcgaacatcaggtgtatccatttgatcagttagtggaaaaattagatctttctagagacttaagccgaagtgctttatttgatgtcatgtttgtattacaaaattcggatgaaaaacatacagttgtggatggattagaaattagcacggaaacaaacacagatacactaacaagtaagtttgatttaactcttattgctgaagaaaataaagatatatatgaattcacttttgaatatgctacatctttatttgataaatcaacaatagtagaatttggacggcgatttaaccttctattagaagaaataacaactcatcctaatgttagtctaaaagatattcaaatgttaacaagtgaggaaaaagaacttgttttatctgcgactcaggagaaagaaaaaataaaaatagagactgattttaattgggatataggttaattgatttcccaggtctcagaaggagtaattacatggataatcatgaaaaaatacgtcaatacattaaaaaaaatcttattatttttaatgcagaggaaactattgttgctaatgatgacaacatatttgaaaaaggttatgtaaattcgctctttgctatgcaaatgttaaatttcatagaaacggagtttgatatagtagtagataatgatgaacttgatattattaacttttctactattaataatatggttgatctaattaacaaaaagaagaatgggaatttcacagtatgagtaatgcagaagagattctgggagtagttgatgagtttgcggaaaagaagcttcggcctcgagcaagtgagtttgaaagtaatgaagagcttccctatgatgtgatacaagaaatctcaagttatggtgtattgggtgcaacgataccaaaagaatatggtgggctttctcttgattctttagattatggtcgtcttactgaaatcattggtaaagcttgtaattcggttcgtgaattacttacagttcatgaatctttagtaggggagtcaattaaaaggtgggggactgaagagcaaaagagaaaatggttacctgagatggcaaaggggaacctattattttcatttgccctaactgagccagaggttggttctgatgcaaaagctgttggaacttcctataaacaagttaatgatcattttattcttaatgggcacaaaaaatggatttcttttgctgacattgcggattgttttttagtttttgcgtctagtgagggaaaagttagcgcttttattgttgaacggtcaatgacgggtgtttctacaaataaaatgagtaaactgttagcaagtaattcctcgcatatagctgagattcatttgcaagatgtaaaggtaccagctgaaaatttgttaggaccaattgggggtggatggagttatgtagttaacacagctcttgatcatggtagatatagtattgcctgggcgggagtagccattgctcaagaagcactagaagcaatggtagcttattcaagaagaagaaaacaaggaaataaatatatatgtgaatatgaagcaattcaaacaattttagcagaagcaagtgtaaatataaaagcagctcgttcgttatgccaagaggctgggaaaaagcgtcaggatagacatactgatgctgtaattgaaacaaccattgcaaaatattttgcctcaaagatggctatgaaggtagccacaaacgctgtccaagtgtttggtggaaacgggttttcaagagaatatcctgttgagcgtttatttagggaagcaaaggttttagaaattattgaaggtacctcgcaggtacttcagccaattattgcgcagcatgcacttcacacttgttctcaaaagggaggacttttaagaatatgatttatgaattggtaaaagaaaaggatgaattcaaacaaatatctccacttctcgttgattataagaaccatccaatactgaatggtatagttcatggttacaataagggacatatttatgtggataatcctaataaccctagatgtgcacttgtatgggcagaacaagaaattttttatttattaggtgatcctacaagtaattttgtttcaagtctaccaacttttattaaagaagtaattgcacctgaggctcagcagataggggatgacttttttcaggttgaattattacccgaatcaaaatggaaacaggttgtcgaggaacaattgcaaatgtttattcctaaaccttacactcgagtaacatttacttttgatccggagtcttataataagttatctaaacctaatatgcctgatgaggtaacggtggaacgcattacaatcgacatgctatcagataaaaagttcgcaatggtacgggatgatattgttgatttttgggagtcaactcaggatttcatccgaaatggatttggttatgtagtaatggtacatgaacaagttgtaactagttgcttatcggtttttgcaacagatactgatgtggaaattggaattaatacttatgatttattccagcgaggtaaagggtatgcttggttggctgcaagagcattcttggatgactgtttaaaacaaggaagaacaccacattggaagacagaggattttcgtattccatctattaaactagcgggaaaagttggattcacaaatcttcaaacctatacagcttatgtgtttccttataacgaattagataatttcgtttttaccgcataccatcaactaagatactattcagattttaataaagctagtgagtttgtacaaaaagctcgtactgtaggagatttaaatgcatggcatcactttttactttcatgtggttattcattaattgatagaatcgatctttcgttaaagcatatgaatcttgcactggatttaggatggaatgatgtatcagatattcgctatgtagttgatttagtgaatttaagaaaaactgaagagggacgagctttattagatagagttgaagatagcttaagatgaaaaaaagggagataaaaagatgaatattgtatttatgtttcctggcgtaggatcccattattctggaatgggtaagtacctttatgaaaacttccctgtagcacgtgagatatttgaagaagcaagtgacactctaaaaatagacatggcttccctttgtatggagaagatatacaaagctgaccttgaaaagttacaaaattcacagactgctttagtaacaactagcatggcagcttttcgagtttttgaacaggaaataggcaataaaccagaggcaatgattggatattctttgggagaatatacagctctatgtgcttctggagcaattgcattttcagataccttaaaattagtacaagaacgtagtacgattttgagtagctatgcattgactatagatggaactatggcatgggttaacaatcttgctccagaaattgttgaaggtatttgttcagaattgttaaccaagggacaggaagtatatatatcggcttatgacactccaaataaaacatcaatttctggtacaaactctgcggttcagttagcttgtgaaatggtagtagagcatgggggaattgcaatcccccttaaattaagtgggccatttcattctcctatgatgcaacctgctgctgaaaaatataagagtgtactagaaaatatagatatgaaacagccattagtacctgtcatagcgaatcatgatagttcaatgtataaaggtgtagaaaatataagagaaaacctttacttacaattaataaagcctgtgaaatggttggacatgattcactatctaatgaatcaagggtctatgaaagctattgaaatgggaccaaaggaagtcttgaagtatcttctgcaagctattaaccctgctatatcgacatttaattatgaaagggagaaagatatcctaaatacaaaaaattcttttacattacaagaatctgattatgaagaagttatatcagggtgtttaactgtagttgtaagtacaaaaaattataatacagatttaagtgattatcagaaaaaggtagtactcccatttcaaaaggtccaaagtcaattggaagaaaaaattaattcggggtattcagtggagaaaagtgatgtagaagaagcaatccaaatgatgaaaacagcacttactgaaaaacagattaaagagagagaacaaaaacgttacctgcaaagagttcttcaatgtaaaagtttttagatataaattataaatatattaagggagcgatgatggataaatgttcaagaaaattggtattgtaggtgctggaacaatggggatcggcatggcagtagatttagtgctgcatggtctagaaacggtattaattgatgttacagaagagcagttagaaatagcggaagagaaaatattagagacagttcgctttgctcctctaattaataaagcatttcctagaatgcataaggaagaagtactttcgttaataagtagctctactaatcttgatgaagtggctgaatgtgattatatagtagaaaatgttccagaaaactggcaaattaaagagccgatctatagaagattagatgagatatgtaaaaaggatacaatttttggagtcaatacgtcttgtatctcaataacaaaagtaggaggagtaacaaagcgtccagataaaataataggaatgcattttatgaatccggtatatatgaaaccatctatagaagttattagagggtatttaacttcagatgaaacggtcgaaaaagctcaatctttcctcaaacaattagataaagatgcaattgtggttaatgatcagactgggtttgtttctaaccgtatctcccacttattcatgaatgaatcggcttgggttgtaatggatggtgtagcaacgcctaaacaggtagacgatatatttaaaaaatgctttggacatacaatgggtccattagaaacagcagatttaattgggttagatacagtattacattctttgaatgtactttatgaggaatatcaagatccaaagtttagatgttgtccattacttaaaaagatggtggatgcaggtgaatgtggtagaaagagtggtaaaggtttttacgcttattaaaattaaaaattacaaataggggtgtataaaatgcaagataaaaatttagaaaaaattattcatatgtatattcaagatcatgtaggtattgaatttaatgatgatactgagatttttgaagaaggattagttaattctttatttgcaatccaattgatgacttttcttgaaaaagaatttgccataaaggtaactatggatgacttagatatggataactataagtctgtaaattctattggtaattttataagaaataagcaaatggttcggtaatggacatgaaacaatacttagagccatctcaatataaaatgtatcagaattttttggattttgtttatgaaaatatagaaccttacgctaatagttgggagattgaacagggcattccatcagacataataaagacttgtgctaaaaatggttatttaggtggaacacttccagcggagtatggtggattagagtgggattatgtaacgtatgggttatttactgaagcaatagcaagaggtagtgtctctctttcgggattatttaatgtccatacgatggtaacagaaacgattttaaaatggggaacagaaaatcaaaaaaatcagtggttaccattacttgcatctggtaatcaaatagctgcattagctcttactgaacctggagcaggatcagatttaaatatgattaaaacgaacttcgatcaacacggggataaattaattcttaatggagtgaagaagtggatcacttttggtgcagctgctgatgtgtttttggtatttggaaagctaaatggtgaacaaccagttgcctgtttagtaccaaaagatagtgcgggtgtaaatgttactcatataagagacatgcttggatttaaagctgcatatttggcagaaattgaattcaataatgtagaaatacctttagaaaatatcattggtagaccaggatttgcttttacttaccttgcaccgtatgctttagaatttgggcgtatttcaattgcctttgctgctcttggtgtattacgtacttgtttggaaatatgtgggaatcatgtattgcatagaagtgcatttggtaactctctaattgatcatggcatgatttcacatatgattacggatatgggagtagatttagaagcttctatactacttagtttagaagcttgtaaggccaaaaatgagcatcgagctgatgctactgaaaagattatgattgcaaaatattttgcatcgcgctcaggtacaaggcattcaacgaatgctgtacagattatgggagcacttggttgtaatgataattattcaatatcaaggtgctttagagattctaaaacaatggagatcgttgaggggagtaatcagattcatcagctattacttggtaagggatttgctaaaaaagcgaaacgtgccattgaaaaaatacctgtaactaaaggagtgatacaacccggatgagtacatgtatacaaaagctgtttgaagaacaagtagtccgtacgccagatgaggttgctgttatctttaaaaaagaaacattaacctataaggaattaaatgaaaaaagtaaccaattagctcgtcttttacgtgaaggtggagttggttcagatacagttgtaggtattatggtagagcgatctatcgaaatggttgtcggaattttcgggatattaaaagcgggcggagcatatctgccgctttccccgaaccatccatcatcacgattacaattcattatagaagatagcggtgctaaattaatactgacgcaaaagcaaatcctacatcgttttcaagatagtttgaaggctgatatgttggctttagattcgatttcctatgaaggaaagagtgaaaatctagagtgtattaacaaaccctctgatcttgtgtacgtaatatacacttccggttcaaccgggaaacctaagggtgttatgattgagcattcggccttaataaatcgaattgagtggatgcaagaggcttatccaattagttcaaaggatactatattacaaaagaccccttatacatttgatgtatccgtatgggagatgttctggtgggccatagttggagccaaagtatgtattcttgcgccggggatggagaagtttccacaggctattattgagacaactgaaagtaatgacgtgacaattatgcattttgtaccatctatgttaagtgcatttttacactatcttgatgtgacaggtgaaactaaccgaataaaatcgttgaaacaagtatttgttagtggtgaggcactactgtctcaacatgtaaaccgttttaataagttgctaaatttctctaatggtacacttcttactaatctgtacggacctactgaagcaaccattgatgtgactgcttatgattgtccgacacatgagattacagaagggagcgttccaatagggcgaccaattaagaatattgagatgtttgttgttgataaatatggtaataaacttcctgaaggccatataggagaattatgtatctcaggtataggattagcacgtggatatgtaaataggccgcaattaacggcagaaaagtttgtacaatattcccttgatacccgtatatataaaactggtgacttagctttaataagatcggatgggaatattgagtttcatggaagaattgattttcaagttaaagttaatgggcttcgtattgagttaggggaaatagaatcgtgtttaatgtcttgtgaaggagttttacaatgtgcggtaattgtaagacaagaatcagagatggtagttaagttaatagctttctatgagtcagaaaatgatattgagttagagaggttaaaaaaatatcttcgcttatttttaccagattatatgatacctaaccgttttgtacgtgtaaatgaaatgccattaacggatagcggaaagatagatagaaaagcacttgccttattaggttccgataaatattcacaccataccacacttgtaggaggttctgttaatgaggaaagcagtaaagattcataaagaagatattgaagatgtaatcgcccttacaccagtgcaggaaggaattctttatcattatttgaaagaacccgaaggaaagctatatcatgaagaacttcgactttgcttaactggaaaaattaatattccaaagtttgaagaggcgtggaattatgtgacgcgggaaaatgaaatgctacgtacaatttttcgatgggaaaaagttaaacaacctgtacaacttatactaaaaaagcatactccgaagattatgtatagtgatggtaaagtctctaataatacagaaagctttgatttacaaacagttcccttttctatcgaactgtgccatttgaacgaaggcgaatatgaaatggttttacgtcatcatcatattttgtttgatggttggagtaatggtattattttacaagagtttattgaggtatatcgagagttaataaagggagaggtaccatcatctataaataaaaagaaatttaaagaatatatactatggcaacaaaaacaagataaatcaaaacaaaagcttttttgggaacaatatttaaatgaattaactgaacaaataaatttatccaataagaattctaatgaactaaaaaaagcaaaaacatatgtaaaagagatagataaagagcgaagtgatagattccgaagttttgcaagtaatcaaggtgtaacattggctacattattttatacagcctggggtctattattacaaagatacaaaaattcagaggacgtaatattcggtacaacagtatctggtcgttcaattccaatgcatggtctgagtgaaatggtaggtttatttataaatacaccaccacttcgtgtaagtgctgatgggagaatgactgtttcagatcttttacaaataattcaaagtgatgtccaaagaagaactgaatatgaaacgactccaattgttgatttaaacgtgtcatttgacactattatggtagttgagaattaccctcttgatatagaaaagctgaaagaaattgatgaaggtgtaagaatttcaggttatgaagtaaatgaaatgaccaactatgatttaactgtctcaatagagtgtttcgattctattaaacttgcaatgatgtggcctgaagatgtatttgatgaatccattattaccagtataactaaccattttatacagctattagattcaatgcttttagatgaaggacaaccaatacaaactcttaaaatgttagatgaggcagaagaaaagtttttgcttcaaggtggtcaaaatcaaagtgctacattcccacacacaacacttcatcaattaattgagatgcaagctgaaaagcatcctgagagagtggcacttacatttgagaatagtgagatgacttatggagagttgaatgagcgtgcggataaagtggcatttgctcttctaaaagaaggtgtaactttagattctccagtagctgtaatgttggattactcatttaatatgattatctctctacttggtattttaaaagcaggtggggcctatgttccaattgatcctgattatcctcaggaacgaattgattttattcttcaagatagtggttcaaatgtaataataacctcaaatttatttgaggataaagttaaatttgatagcacaatgctttttattgaagaactcaatgagacacctatgcaagatttcgagagagtagatgttgccccaaccaatttagcatatgtcatttatacttctggaacaacaggacgtcctaaaggggttatgattgaacatcgaaatgtaatacaacttgttatgcatcaaccaaatagttttaaattttctagtaatgatgtgtggttactgtttcattctttctgttttgatatgtcagtttgggagatatttggatcccttacttatggtggacgtcttgtcctggcaacaaaaaaaacaatccgtgatacgtataaacttgctcagttggttgcagatgagggagtaacgatatttaatcaaacaccatctgcattctatgtttttcagcaagtagttgaagaaatgcctaaactttctttcagaattaggttacttacatttggaggagaaatgctgaagccaggtttactgcaaagttggtttaagcgttcacctaatacggtcatagtaaatatgtatggaataactgagacgacagtacatgttacttataaggaaattggagaaaaagaaatgcacagtaatcttagtgctataggcgtgcctcttcctacgtattcgtgctatgtatttgacaaacatatgaatcctacacctaagggaatgcaaggggaactttatgttggaggatatggagttgcgcggggatatctaaatcgtcctgaactaaacagtgaacgttttatacagaatccttataatccaagtgaaagattatatagatcaggagatttagtccgtattcttgaaaatggcgaaatggagtatataggtcgtagtgatcatcaagtgaagatacgtggttatcgaattgaaacaggagaaatagaacatcatttacaacagcatgcggatgtgaaggaagcggtagttttatctattgcttttggagaggaacaagaactgtgtgcttatatactaactgatcaagatatatctcaaaatgaattacgttattatcttactgacaaaataccttcgtatatgatacctatgtattttgtacttttaagtgaaatgccattaactacgaatggaaaagttaatcgtcgtgctttacctaagcctactaagttagtacaaccaaatgatttactagatgagcttgaaacaacggtagctgatgtttggaaggaagttttgggggtagaaaaagtagggttgtatgataatttctttgatgttggagggaactccttaaaaatggttcgattgttctctcgtttacgaagcaagtttgaaaaagaacttacaatgcctatgttattccgatacccaacggttcatgatcaagcttcctactttagaagtgataatgctatggaacaccaacctgaagaagttaagaaagaaaattttttatctatgaataaaaatgatgtagcagtggttggtatggcggttcgtatgccaggcgcttctaatcttaagcaattctggtcaaatttagaacaagggatagaatccattcgtacatttacagatgaagaacttagtgagatgggcataccaaaagaagtgattcaaaaacctaattatataaaatctaaagggtatttagaagatgtagatgcattcgataatgaattttttgattacagtctaaaagaagctgaaatgatggatccacaactgcgaatacttcatgaatgcgcatgggaagcactagaacaagcaggtgaggttaattcttctcatatgaatacaggagtttatgttggaggatcaccaaatttccactggcttcgttctattgccagtgaatcttctaatacattagaagatttccaagcaatgttgttaaacgaaaaagatttctttgctactcgattggcttataaattaaatctaaaaggaccagcggttacagtacaaacagcttgttctacctccttagttgctattcaaaacgcatgggcagatcttattgatggacgatgcgatatagctctggccgggggagtaagtataacttatccaacaaaaacaggatatttatatgaagatggtatgattttctcaccagatggtcattgtcgagcttttgataaggatgctcaaggaacagtgggtggaaatggtgctggtattgtagtactgaaaaggttggaggacgctcttcgagatgggaatttaatacatggagttattaagggggctgcagtaaacaatgatgggtccaataaggctggatttacagcgccaggggttgatggacaagctgctgttataaaatcggctcatgaaatagctggcgttaagcctgaagaaatctcatatatagaaactcatggtactggtacgcaactaggtgatcctatagaagtagaagcattgaagttagcttttggtaagcaagaaccaggtagaattttaattggatcagtgaagacgaacattggacatttagatgctgcagcaggagttggaggatttataaagacggtcttagctttgaaaaacaagaaaattccgccgagccttcattataataacccaaaccctagcattgattttggaaaaaatccgtttcgtgtaaatacggaacttatcccatggaaaggagaggtaagaagagcgggtgttagttcgtttgggatgggtggaactaatgcacatatagtgttagagtctgttcctgacaatgctaagaattttgaaaaacaatcttggaacttattaactgtttcagcaaaaacagaggaatccttagataaagctactaacgatctattattgcatttgaaggggaatcgagagatatcactatctgatacagcttatacattacaaaaaggtcgtcgtgaatttccatacagaactgctgtagttgttaatggaatagaggatgccatagaaaaacttggtgatacgggactagagaaaacaaacgcaatggagagtagacctttagcctttcttttttcagggcaaggatcacagtatatcaatatgggtagagatttatatgaaaatgaacctgtatttcgtgaacacgttgatcaaggtttagccttactctcaaattggttagatatagacatgaaaaatattttgtatcctacaaaggagacagaggataaagcaactgaacagttaaatagaacttcaatgacgcaacctctactattcactattgaatatgcattagccaagcttctaatgaattggggagtttatccaagggtcatgtttggccatagtattggtgagtttgtagcagcttgtttagcagaagtaatgtcttatgaagatgcattacatttagtaatgattagagggaagttaatgaatagcgtatcagaaggcgctatgctaagtgtaaatttatctgttgatgaattacaaacctatataacagatgatgtagatatagcagctgtaaattcctctcaacattcagtaatttctggtactgtactttcaatcaataagattgaggaattacttttaaatcatggagtaaagacaacgcgtctatttacttcgcatgctttccattctcgaatgatggatgaagttctagatgcatttgagcaagctgtaggaaatataaaattatcaagtcctaaaataccttatatatctaatgttacaggtgaaatgattacagcaaatgaagccacatcaccttcttattgggcacagcatctacgaagtactgttcaattttcaaagggattatctgaaatttttcatttaaaaaatgtaatttgccttgagattggcccaggtaatgcattatcaacttttgtattaaaacatttaaatagaagtaaagatcaattggctttaaacatgttacgtcatcctctggataaatcaaatgacttcgagcatttatgcaagcaaatgggacggttatggatgcaaggtggaactataaattggaatacttttaataacagtgagaataaaaggttattagatttaccaacgtatcctttcatgaaaaaacgatttaaagctgatccattttttaatactcaatctcagagtttaactcaggaaacaagaggccataataaacaggctaatattaaagactggttttatttgccttcttgggaacgcaaaacattaaaatctatacaaataaagaaagaacaaaaatataaatggcttattttcaatgatcatctaaatcgattcaatcgactgatagaaaaattaaaaagagaaggtcatgatgtaattgaagttaaaacaggtggtattttctctgaaaaatccgacggtttatatacgatatgtccatctcaaaaaatgcattatgaaatgctattttcagaattagaacaaaaagatttattaccaaataagattatacatgcttggagctttaatccagttaatgatgttattctcgatcaagagagaattgaacgatcaatggatgaaggatattattcgttactttatattgcacaagcaattgggaaaattaattatgagggcgcattacagttaaacatttttactgaccgtatgtttgaagttacaggtacagagctgaacttaaagccagagcaagctacaattctaggcttttcaaaaatatgcaatcttgagtttcaaaatataaaatgtcgtaccattgatatggatacagattctcaacaaatgtttgaagaagcgggtttaatggagagttttgtggattctactgatatagttgtagcttatcgaggacgtcatcgatgggcgcaaacgattattcaaagtccttttgaggaagaagatgtagaaattgatagattacgagagggtggcgtttatttaattactggtggacttggtggaattggatttgaaattgcaaaagatttagctaatagagtaccaaatgtcaaacttatattgattggccgctcagagttcccaccacgtaatcaatgggaacagtacttagaaaataaagacgagcgtgtaagccgagttatttctgatttgttgacaatggagtctcaaggtgcagaatacatgatcctaagttctgatgtttccaatcaagatgatatgaaacaggcaattgaaaaggctaaatctcgttttggttctattaatggcgtaattcatgcagcaggtgtcgctgattatctaggtattatgatgaatcgtgaaaaagaatctaataataaaattttagctccgaaaattaaaggtacactagtactcgatgctttattaaaagatgaaccaattgatttcttcgtattatgttcatcaattggtaatgtggcgtatcatatgaaatttggtcagagtggttataatgcagcgaatgaatttttagatgcatttgcgttttataagcgggctcatgatggagtgttcactgtagctattaattggccagattggcaagaggtgggtatgtcacttaagtcggctaaaatatgggcaaagcaatttaatatggatatggaaagtgtattacatgatggtgtaactgtagaagagggtttaaaagtattccgtagtatcatcaatagaaatcaacaacaagtcgtggtttctccaatagatttacattggaaacttttaaatggtgccaactattataatgaactattggaaaaaggaagtaagaatagattaaagcagaatcgttcagatgtttccacaacgtatagaccaccaactaatgaaattgaacaacaattatacgaattattaaaagatatgtttggaatcgaagaaataggaatttacgataatttcttcgatctaggaatgagttctttagatcttgttcgtattaatgtgaaattaaaagaggcctttaaacgagacttacctatagttgttctttatgagcatacgtcaattaaatctcttgctaaatatttaagtaatcaagaagtaaataacaatttaacaaataaaaaagagttattgaaagcgaaatcggttatgaaaaatacattatctgctttaaaaagtagaaagtagtaaagggaggggaacaacatgattaataaagaagtagttccgtcaaaagttgagttttgctggggattacctgttattccaacaccacaaacaaaagaacttctagaggaatatgttaatcaagctaaaagagctgagaagaataactttgactcggtattggtttccattgcaccaacatctgttgatccaatgatagcagcgtctatgattggaatgaatacggagtttgtaaagattttggttgcgcaaaatacaaaccagatgcttcctaccgtaacagcaaaagcattgaatactttaaatagtttaattggtaatcgtgcagatattaacattgtaactggaagtgcctcgcttgtccttgcgcgtgatggattaccagaaccgcaccatgttcgatatgctaggacaaaagaatatattgagctgttacaacaattaagacgaggagtaactagctataaaggtgagttttatcaagtagaaaatagtgatatttatccaaaggaagatctctctcgaagtgcccgctactttgtagcggggtcctccgaggaggcaatgagagtagctgcagagtatggtgatgcttatatactttatgcaacagaccgcaaaagtcttagagaacactatcaaacagttaataattacgctaagcaatatgggcgcgagaaaattccaggtgctattttagtagacatcattgctcgtgagacttcggaagaagcatataaagaagcatatgaattacttgagagaacaccagcagccttaaagaggatgactaagctatttttagataatgcagattctgttggacttcgccgatacaaagatttaattacaaaagatagtatgtggatagatgatcatctttggggaggtctaagtttagttaacccatctaattcaatttctatagttggtagctatgaggaagtcatctcgacattaactgatttttgggaaataggggcaaattattttcttattacttctcagattagtgagcatgaaattgaacgtattggtcaaaatgttgtgcaaccatttaaaaagaaaattgaaaagttaatccaagttaactaaaagagggctaaaaatatgaagttaaacatatggttgaagtttatcattttaatgactttaatagtactcccttatcgacaggtggaagcgcaggaaacggtacagtttaatgagaagaaaatacagaagcatatagaagaacaaatatctcaagcgggtattcctggactttcagtagtaattgtaaaaggaaacgaaacgatttataagaagaattatggttatgccgatatagacaataaacgtcaagttacgaatgagacgcttttcgagctaggttctacttcaaaagcttttacggcattagctgtattgcagctagaaaaagaagggaaaattaaacttagtgattctttaactaaatatgtttcatggtttgaaatggagtataaaggcaaaccttatgaaattacactttatgacttattacaccatactagtggaataccggaaaaggccattggatatattcctataaccaatggcaaagattctattgagaaaacgattaggaatgttatgccaataggactaaaccgagagccgggtagcagttttgaatattctacggttaactacgatctattaggattagtaatcgagaaggcaactaatcaatcatttgaaagatatgttcaagatcatgtgctatcaaagttggatttattgagtacatacgctggacgtgagatggccccattagataacatggcccaaggttacaagcgtaatttcttacaatcattaccctatgacgctcctaattatagggggaatacaccggctggatattttatttcaaatataaatgatatggaaagatggttaaaattacagcttggggttgaaaagcctaggatgtttccggaggaattgattaacgattctcataaagcgaatagaaaggttgccccagatagcaatggagcttcatatgcagctggatgggaggtctatcaaagtggtggaggggaaatttcacatggtggaagtaacccaaattattcatcgtatattggtttccgtgatgaggaacagataggggtcgtagtattagcgaatctgaatagtaattacacttactatatcggtagcagtcttttaaatatgatgatagataaagaagttaaaccgttactctatgatgaatataagaaaacggatcaaataggaacagccttatttgtgatctcatctttgtgtttactaacgttattggtcatgttatttcatttaatcagggagattatttttagaaaaagaaagtttatattaccaacgggaaaaacatggttacatatggtattagttgttgcgatatatgggctaatgatttatgcactttatcaactaccaaatctcttgtttggagggcttccgtgggcatttataaaagtttgggctccttcaactgttgtacttgcaatatatgcaattgctggggtgggtttggcctatgttatccatacattcttaaatctttgttttccaagacaaaagggaaagtcgcttttgactttaattgttttgggattaatatcaggatttggtaatgcctttctcatttttgtgattaatgaaacgtttgttagatcaaataatttggaaaatggcttgttgttttactttgtacttggaatcgttatgtatgtcttttcacaacgtattattagaactagcattgtatcgtatacaaacgagctagtttatgaaaaaaggatggaattaacagataagttgttacagactccttattacaaattggagttgattgagaagggccgaatagaggcgacattaaataacgatacggaagttatctctcgttctctcaatctattagttactgctggaacaagtttattaacgttactattttgttttctctatcttggtgtaatgaatatgtatgcctttttactatccttgtgtatcatctttattactgcaggggtatattctttgatcggacgacaagcagataaagtttggaatgaaacaagagatattcagaatgtatattttcgtttgattggtgatctaaggcatggtttcaaagagcttaggcttcatactggaaaacgaaacgattttcgagaagttatgaatgaaagctgtaataactatcgtgttaaacgaacgataggagatattaaatttgcaaatgtgtttgttctgggagaactattattcatttttgttattggtattgtagttttcgtatttccagaaatttttgttaatatgccgaaagagacgataagtaactatgtaatcgtttttctgtatatgacaggtccagttaatgaaatactgggcggtatccctcagctcgtaaatgtacgtatttcttggcaacgtattcaacaaatggtgaagagtgtagatcatataaaggcaaatgagcaaatcgcgacaacaaaagagtacttagatgtgccaatttgtttgcagctacaaaatgtaagttataagtataagaataaagatggagattttactggttttggtattggtccaatagacatggagtttaattctggagaaatagtctttattgctggtggtaatgggagtggaaaatctactttatcaaaactgattactgggttatatgaacctaatgaaggtaacattttattaaatggaaaagaaatagctccagaggaattgaatcaatactattcagctatcctgagtgattttcatgtttttgataggctatatggaattaatacagaaggaatgaaagcagaaatcgatcattatttagaacttctccaactgagtgacaaggttggcattgagaatgggcgctttactactacgcaactatcaactggacaaaagaaaaggttggcattgctggttacgtatttggaagatcgacctatacttttatttgatgaatgggcagcggatcaagatcctggttatagacgcttcttttatgaagaattgttacctcaaatgcgagcaaagggtaaatgtattattgctattactcacgacgatcaatattttcatttggcagataagcttatagtgatggagatgggaactgtgaaaatgaataaaacaaaggaggcattatcatgagtaaggaaattaaatgtgttgtttgggacttagattgtacaatttgggatggtgttttattagagagtggtacagttactttaaaacctggaatttatgaaattatatgtgaattagatcgacgtggaatactgcaatcagttgctagtaaaaataactacgaagatgcaatagctaaattacgggaatttggaatagaagagtattttttatatccggagattcattggaactctaaatctagttccattgagaaaattagaaaaaatttaaacataggtattgatacttttgcgttcattgatgaccaaccttttgaattagaagaagtacagagtgttcataatgatattctgtgtatacatgtgaatgaatataagtcgttattagacttgccacgactacaaccaaaaagaattacagaagattcaggtcgtcgaagactgatgtatttagaaaatcttaagagaacgaaggatgaagaagaatatgaaggcccaaaagaagaatttttagcttcacttgggatgaattttgtgattagtgaggctcgtgaggaagatttgcagcgtgcagaggagttaacagtacgtacgaatcaattaaattcgactggtattacctatgattatgatgaattaaactattatcgtaatcatccagattatttattattagtttgtgagttatcagacaaatatggctcctatgggaagattggtttaacacttgtaaaaaggacggaggaagccgactgcctaaaacttcttctcatgtcttgtcgtgtaatgtcccgtggcgttggtactatactcctcacatatctaatggaaaggacaaaacaggcaggtaaacgctttttggctgagtttcgacagactgaccgtaaccgtatgatgtttgttacgtaccgattagctggatttaaggaaactagcaacgaaaatggaatattaattttagaacataatcttgagaatataaatccttatcctcactatattaatatacaatttccggaaataccaacggatgtggatagaggggaagtggaaatatgcaacaaacaattgtaaagcattctcttacgcatccacaaaaaagagtttggtataatgaacaaatttatccaaacacatctatgtataacatcggagggatggttcttattaatggggaaattaattttacaattttagaaaaagcaattcaattattcattaagaaaaatgatggtttacgtctacggatttttcaacaacatagagaaccccaccaatatatatcaccatttgaacctacaccaatacgtttaattgatttttctaatcatcataatccaagtttagaagctagaaaatgggcccaggatgaatttcaaaaacaaattccacttgaaggaggccctctgtttgaatttgtgctcttgaaaataagtgatgtagaaagctcctattttgttaagtttcatcatattatagctgatggttggacaatccaacttatgacgagtcaaattatcgatttttactctaagttaaagaatgatgagcatataaatgatacggttgaatctacttatctgtcttatttacaagcagaggagaaatatctggaatcccctcgatacgtaaaaaataagaattattggaatgagaaatttatgaatctgccagatttctttttatcaaaaacatctcattctctagaagggaaacgaaagatatttttaattgaaaaagaaaaatcggttgctctacagtcttttatacaaaaacatagaatatctatgaatacattattttcaacctttatgcttatttatattcataaaatgtatgatcaatcagacataatcattggatctcctgtactaaatcgttccggtgtactagaaaagaaaatagtaggtatgtttactagcacaatgccgttacggttaaatgtggatgaagatgagagtgttctatctttcattaaaagagtaaatcatgaaataaaacaatgtctatttcaccagcgttatccttataacttattggtaaaagacttgcaattgactagtaaaggatacgatggtttatttcaatatagtgtgaattactataatacaaaacttaaaaatactattgatggattttctttagaaaacgtggagttttacagtggttaccaagcctattcattgcagttagttattaaggaatgggcagatgaaggtttagaaattcaatatgattataaagtcgcggattttgaagaagatcaaatcaattgtatgcatgaaaggtttttagctttaatagaacaagttttacgtaatgaagatcaatcgataaaagaattatctttgttatcggatgatgagcaaaagtttatgttagagaaatttaacaatacagctgttgtgtatccgaaagaaaaaactattcaagaattatttgaagaacaagtaaaacagacaccagaaaaaatagcaattcaacatgctgatagatcaatgacttatcttgaattaaataagaaatctaatcagttagcaagaaagttacgagaaaaaggagtcaaaaatggtcaagtcgtgggtatactagctaaacattcacttgagatagtaattgcaatttggggagttattaaggctggaggtacatatttgcctatagatccttcctacccagaggaccgaattcgttatattttgaatgatagcggcacaacattacttttaactgactatacaaatgagggtaatttagaatatttaggtgagaaaattaatatatgtgatcagaaactttatgaaggagataatgccaatctaaacctagtaaatgcaccaaatgatccaatatatataatttatacctctggaaccacggggaatcctaaaggaactgtaatcactcaatgtggattggttaactatatttcctgggctaaaaagaactatattagtagtgaaaatgatgtttttgcattatattcatccgtttcttttgatttaacagtaacttcaatattcactcctttaataagtggtttattgttagtaatatatcatgataatgaagatgagtttattttgtcaaaaatactcaaggaaaatgtagtaacagtgttgaaagttactccttcacatttagcattgttaaataactattcacccccaagagtttcatctcttcgcagattgattgtgggtggagaggatttgaaaacctcagtagccgaaaagatatatgatctttttagcggtaaagttgaaataattaatgaatatggaccaactgaaactgtggttggatgtatgattcatcgttatgatccagatctagatcgaagagcatccgtaccaattggtacaccagctgataatgttcaaatatatttattggataagaatcttcagccggttcctattggtgtaaaaggagaaatttatatatcgggtgatggggtagctaaaggttacttaaatcgtccggatttaacagcgcaacgttttttatccaatccatttatttcgagtgagaagatgtatcgaagtggtgacttagctgtcatgttgccaaatggattaattgagtatcaaggacggatggattctcaagtgaaagttaaaggatatcgtattgaaataggggaagttgagaatgcactgttacaacacaagtctgttaaagatgtagtagtggtgaattggcaaggtgaggataattcaaatcatctagttgcttacattgttttgaaagacagtgttcaaaatatagaaatacgcagttttatttcgcatatgctaccaagttatatgattccttcattttttatctatatggatcagctaccgcttactatcaatggaaaggtagatcgtcaagcgttgccagatccgatgttaaataacggttctaatcatactcatttagaagaagtagatgaagatgttactggaatggttagtgaagttctcaaggaaatattacagactgatagaatcgaattgcatagtaatttttatcatttaggtggagattctattaaagcgatccaagtgagcgctagattacaagaactgggatggaaagttagagttaaagatgtactaaattatccagttgtaagtgaattggcagcaatgttagttaaacaaaaagatgttacagtctcacaaacattggtaacaggaaaggtagagcctacgcctattatgcgttggttccttgatcaacagtttaagaacccgcatcattggaatcaatcggtattactgtctttgaagaagccggttaaagaagaatatgttaataagatgttaaatacgatcatgcatcatcatgatttgttacggttaaggtacgaggataagcaggattacttctattatgacgaagatatgtccattgttgattctaaggttaccatgtttgatttgtctgaaattccaattgaaatggctttgaatcaggttcatataaaaggtgaagagttaaaaggaagtttaaatttgaatgtaggaccattatttaaaggggccttattccagctttcaaatgatcaacagttgttattattaactgcacaccaccttattgttgatgctgtgtcctggcgtattttaattgaagatgcaaaccgatgtttgaatagcttgtatttaggagaagttccatcgctaccattaaaaactaactctttccaagattggtctgaagctttaaatagtcgaggagttaatttagtacatgctgaattagattattgggaatccatagataacacgctagataataattttcaaattaatagagaaaaagaaaatagtactgttgaaagttgtacgactcttacctttacattgaatgcagatgatacaagaaaactattaactactgcaaatgtgccttacaatacacaaccaatggagttgttacttgctgtgttgacagaaaatttaggtgaatatacaaaccaagatcaaattaaatttgagttagaaggtcatggtcgagaggaattatttgagcatcttgatatttcacgtacagtagggtggtttacaacgatgtatcctattgtattacaagtttcgcataatattgctaatcaaataaagagtgttaaagaagaggttcgtaaaagacctaataagggaattggatatggaattcttaaagagaagtttccttcttgcaaagatttaactcaaaatataattcgttttaactatttaggagagatagataattctctcggggatggatggtttactattgttgattatcaaagtggcagtgaacaatcaaaagataatcatattactgcattattggatattgtggctatggttaagaataaaagcttagaaattcatgtgacatttagtacaagtcattttcaaaagaattttttagaaaatttattttcagattatctagaacgactacagacatatatccaatcctgttgtcaaatgcaaacaaaagaatttacttcatcagattttgaaaccttaaaccttagtgatgaagaaattgataatttgtttgattaaacaactatttgatgaaaattttatttaataaaggagaagtcacttgagaaaattaatgaaagatttatcgccaggattgaatagtaaaaaatatttggtttgtgttccttatgctgggggctattcgaattcttttttacctttaaagaattatttaccgaaagatataaaacttatttcatttgatcctccaggccatggtcctaatctttctccactagttgataacatagatgatcttgttaatttatatttaatggagatgcaaccaattttagagggagaggttacattatttggccatagcatgggaggaattatagttcaccgtatggctcaaattttagaaagtaagggcataaatcctaaaaatgttattatctctgctatgaatccaccggaaataagaagaaaaacaaatcatttagatgataaagactttatagattatataaagtctttgggaggattaccggatgaagtattacaacatcaggagcttttaaactatatccttccagttattcgatcagactttcgtgccattgagaattatataaatgatgacacaacattgttgaaagcgcccctatatattattagtggaacaacagactctaattatacagtaaaaggggctaagaagtgggtagaatggggcaatgaggttcattttctaatagttaatggtggtcatatgtttttactacatcaagctgacatcgtgggcgagttaattatgaaaatactagatagggtaaaatctgtgaagtaaaaaaattaagagatgtatctgagtaagagaaaagtgcatttctatgctttatgtgaaacttctatcgttaaagtagcaatctaattggtcgtcattgggagttttattactgaggaagaaaactcccaatgacgagtatgattgtgccccctcatgataaaacggataggtctatggggaacataaccactaaatatgtagtatttagtatcaatatcatagagaatggtgggaagaaaaaatgcttgataaatttacccagcaggttttattatctagtgaaaaatttaaaaaagaaaaagaatattggttagacaagttatcaggtgatgttgagttaagtagatttccttgtgattgtctgtctttaaataatattcaggcttctaaagaaagttattattgtcaattcccatcggatattgcgaagagagctgtagcaattagcaataattctgatatgttactgtacactattttattatcaggcgtgaaatatctcttaagtagatataccaatagggatgatgtagtaattggaatgccagtttttaagcaaggtcaagaagagacggtttttcaaaacaactttttattattacgtactcaaataaatcaagaagataatttcaaagaaataatatataaaattaaagaaacaattttagagtcaaatgaacattgtcattttccttttaataaacttactcaattattaagtctagatggagagagtaataatcttcccgtattaaatacaatagtaatgttagatgatattcattgttatgagagtacagataaaataaactctgatatggttattaggtttatgaaaaatgaagaacagttaaaggttcaagtggattacaattctactttatatagtgaaggattagttagtagaatagttaatcatttatataatattttagatatattaatgaaagatccaaataaatctgcaatggatctagatgtaatgcctaaaacagaaaagaatcaaatattatttgatttcaatcatacgactaaagttcataaaacattactttgtgagactgtaacagctcctcaattatttgaagagcaggtaaaacagaatcctaatcaaatagcgattgtatgtaatggaaaagaaattacatataagcaattaaatataaaagctaatcagttggcgagaaggttattagatcagggagtgaaaagagaatccattgttggtgtgatgatggaacgctctattgagatgattgtaggcatattaggtatcttaaaagcgggtggggcgtatttaccgattgataccgatttaccaaaacaaagagtggaatatatgctgacagacagcgggtgttcacatctactaacatatcaaaactctattataaagggagtagcatttcaaggtagtgtaataaatctaatggatatttcttttgaagaagaacaattagaagatttgcagataacgatggaacctcaaaatttggcatatgttatttatacatcaggttctacaggccagcccaaaggggtaatgattgaacatcgttccttaactaattttttgtgtgcaatgtatgaggacttctctcaagatatagggataactgataatgtactattctcaagtagtatttcttttgatgttactatatttgaaatatttgtcccattggtatatggagcaagaatgactatttatcaaggtgagaagtttgatgtaccaaaacttgtacaagtcattcttgaggaacaggtcacgttagcatatattccacctaccttattaaatgaaatatatgattattttgtaagggcgaatcagaagatatcgttaaataaacttttcgtgggagtagaaccaattaaaacagaattactcgcaaaatacgatcatctatttagggggaacctccaaatattaaatttatacggacctacagaggctacagtttgttgtacatcttatcaatatgagagggataaagaaattacaacacaaaacgtaccaataggttcgccattgttaaatactaaaatttatatattggattcatttcacaggctacaacctataggtgttccaggagaaatatgtatttctggcatagggttagctagaggatacatcaatcgaaaagaattaacagcagataaatttattgatcatccatttgaacatggtgagaaattatataaaacaggagatatagcgagatggctacctgatggtaacattgaatacttgggacgagttgatcatcaagtgaaaataaggggatatcgaatagaactaggtgagatagaagcaagtttgttaaaatatgagacaatcaaaaccgccgtagtaatacagcgagaagatgaaagtggagaaaagtatttatgtgcgtatgtagttaccgaaaaagatattcctattccagaggtaagagcatatttagcaaccaagttaccatattatatgatacctcaacaaatcatatccattcaaaacataccgttaacacaaaacggaaaaatagatagaaaaaaattacctcaacctataaataatttgaaatctagtcatctagagccgacaaattctacagaaagaaaattagttgagatttggaaagatgtattaggaatacaaagggtaggaatacgggataatttttttgagataggtggtcattcattaaaggctgctaggctaatttctatcgttaataaagaatttaatgtgcaattatctattaaatccctatttaagtttcctattttggttgatttttcaaaatgtatattagaaatggaaaaaagtaattatatttccatagaacctgtaaaacaacaagagtattatttagcttctacgtcacaaaagagaatgtttatagtagatcaattcgaagatggtacaaatacaacttataatatgcccacaatacttaaagtagaaggggatatttgtaaagataagtttgaaaatatatttcaatctttaattgagagacatgaaatattaagaacttcttttcaaattttagatggggaattagtgcagaaaattgagcctaatgtagatttcaatattgaatacgttcatgtaaatgaaaaagatgcggattatttaatacatgagtttataagtccatttgatttatcaaaacctccattattaagggtgttgcttttaaggatagcagaagaaagacatatccttgtagtagatatgcatcatataatatctgatggtttatcaatggggatattaataaaagagtttgtagaattgtataaaggaaatgagcttccaaaattgagagtgcagtacaaagactatgtgatgtggcaaaatggaccttactataagaatctaattagtgaacaaaagaattattggttaacaactttaaaaggagaactcccggttttaaattttccaaccgattttcaaagaccgactatacaaagctttaaaggtaatgtttgttcttttaatttgggaagagatttaacttttaaagtaaataagctagcaactgaaactggtactacgccatatatgattttattggccatttataacatacttttatctagatacacaggtcaagaagacattattgtaggttcgcctattgctggaaggtctcattctgatactaatcatatgattggtatgtttattaatactttggtaatgagaaattatctagaaaatgacgatgagtttattgagtttttgagtagattaaaactcaatacattagaagcttatgaaaatcaagactatccttttgaagaactattagaaggtttagacttgcatagggatacaagtagaaatccattatttgataccatgtttgtttttcaaaacatggatatgaatccaatatctattggtgaattagaatttacaccgtatccgtttaagcagtcagtttcaaaatttgatttgtcattagtagcaacggaaatagataataacattcatttaaaagtagaatatagtactaagttatttaaagcggagacaatagaaaggttaatggtacattttacaaatatagttgaggaagtaactaataaccctagagtacgattgcgtaatattaatatgttatctatagaagaagaacattgtattatgaatgaatttaacaaaaaagagaattcaaattctaatcatttattagtgcataaaatgtttgaagaacaagtaaaacggaaccctaatcaaatagccgttgtatgtaatgaaaaaggaattacatataatgaattaaatataaaagctaatcagttggcgagaaggttattagaccaaggagttaaaagagaatccattgttggtgtgataatggaacgatccatcgagatggttataggtatattaggtgtcttaaaagcaggtggggcgtatttaccaattgataccgacttaccaaaacaaagagtggaatatatgctgacagacagtgggtgttcacatgtattagtacatcaaataaagggaatagaattccaaggtaatgtaatagatctaatggatatgtcttttgaagaagaaccaggagaagacatgcaaatgatgatagaacctcacaacttagcgtatgttatttatacatcaggttctacaggacaacctaaaggagtaatgattgaacatcgatccttgactaattttttgtgtgcaatgtatgaagatttctctcaagatatagggataactgataacgttctattctcaagtagtatttcttttgatgttactatttttgagatatttgtcccattgatatatggcgcaagaatgactatttatcaaggtgagaagtttgatgtatcaaaacttgtacaagttattcttgaagaacaggttacattatcatatattccacctactttattaaatgaaatatatgattattttgttagagataaccagaagatagtgttaaataagctacttgtgggagtagaacccattaaaacagaattactcgcaaaatacgatcatctatttagggggaacctccaaatattaaatggatacggacctacagaggctacagtttgttgtacatcttatcgatatgagagtaataaagaaattacaacacaaaacgtaccgataggttcaccattgttaaatactaaaatttatatattggattcattttataggatacaacctataggtgttccaggtgaaatatgtatctctggcatagggttagctagaggatacatcaatcgaaaagaattaacagcagataaatttattgatcatccatttgaacgaggtgagaaactatataaaacaggggatatagcaaggtggctacctgatggtaacattgaatacttgggtcgagtcgatcatcaagtaaaaataaggggatatcgaatagaactaggtgagatagaagcgagtttgttaaaatatgagacaatcaaaacggccgtagtaatagatcaagaagatgaagctggggaaaagtatttatgtgcatacgtagttacagaaaaagatattcctattccagaggtaagagcatatttggcaacaaagttaccatattatatgatacctcaacaactcataccaattcacaatataccattaacacaaaatgggaaaatagatagaagtaagttaccgaagctaaatacactggacaatagtaattatgtaccaccaagaaatgacatagatagtagtttaattgatatttggagtagtatattaggcgtaaataatattggtataaatgataatttctttgaattaggtggtcattctcttaagggattaaagttattcgaaaatatcaagagaatgtttaatgtacaactgccattaagtttattatttcaaaatgctactattgaacaattaagtgatgtaataagtaggaataaaggaatagacagtgagtgtttaattccaattcaaaatgggacaaacaaggatagtcaatggttcattgttcatggacaaggagggggtatattaaactattatgatttggctagagaattaggagaggataagactgtatatgggttacaatctataggatatgatgataatagattttcaaacttatctgtagaggaaatggcggtaagatatatagaagagattaaactagtaaaaaaagaagggccatataccttattaggatggtcttttggaggaatagttgcatttgaaatggctagaaaattagaagaactaggtgataaagttagttttctaggtttacttgatgttcatcctattgaacaaggtaaggagattcttagtttaaatattaagaatgcctttgaagaattggaaaaattcaatgatcagttagggattgagaaaattagttttgagcaaatgagtgaagaacaattaatagaatctttactgaaaaaatttacattgaatgaaaatagttgtcagcaaaattttgaagatccaatgatgaataagttaaaagtaatgatagctaatagatatgcatacctaaaatataattgtaaacaaaaaataaaagcagatatctttctatttaatgcatctattaatgacattcacccactagtagattataacagatggaatgaatatacatcaggggaagtatacgctttgcaagtgccaggttcccatctgagtatgttagagaaaccgcatattcatgagttggtaaagagtataaaaatgagttttaaacaaatgctcttattagcacatgcaaataggtgaaatattatttgaaattgtacactattagttttctaaaagtctcataaattcgtgtataacatattatgagacttttttctttgagcccattcaataatagacataaagaggttagaaaataagtcgaaaatatgaatgtaaaatagaatattatcctctgaaaatgttttttactaatcaaaaataaataggaattattcattgagagttttttatatttatataagaagttaggtgggaaggaaataatgaatatatataaggtacgtgtgccaggaaatatagatcataacattatgcagaaacttatgagtttggtctcaaaagaaaagcagatgaaaatacagaaatataaaagaaagcccgaccaatatagcgccttaattggagacattataataagatatttaattactacaaatttctcaaaagaaaataaagatattaaatataaatacaatgaatacggaaagccttatgtggatgagttaaataattttcattttaatatatcgcattccgaaagttgggttgttggagctattcatgaggaagaagtaggaatagatgtagaaaaagtccggcccatggatactacaatgattaaaaatatatttactgaggaagaatttaattatttaaattcattaaatgtagaacaacaattagatgtgttttatgaattatggactataaaagaaagctttgttaaatggatagggaaaggactaactatacctttaaactcttttgttattaaaaaaaatacaatattttatggtgacatgctatctaatgaggtttattataaaaagtttactattggtaaagattataagctttcttgttgtgcttctttagatagttttccagaatcaataattgaaattgactttgttgatttgtgtaattactttatagaagataagcattcttacatagtttaaaatgatcgatatttccttaaggaaagaaaattttcggaaatttaattttgaaaattataaaagcaaagatctgaataagtaattaaacttgctggagatgcaatcattttacgcttaatagattactttgtgtatatattagtatgtcattcattgtttgtttacttagatcaatggttgcaataacaattgttagcgttatagctgtaacaattaagaggttatcataactaaaaatagcgagccagtagaaggagtatatctcttttaaagaggactctttaatgactgcagcagtaatttgtatcttaactgacaatccggaaaacgttatttttgaatgggtggattttttagaagtgggctataaaagaaacagccaacattgtatgtatattattagtaaaaaagataatttgaatatgaattgacagaaaattgatgaaagaattgagaaagctgaaaattctgtattttgagtatatttttagtgttgtagtgtgtaatatattcagcagagctatatcataaaaaataggaatatagactaacaatagaattatatgtaagtatttctgagtaaaaatagtattcgagttcatataggctatatatcaactgctatacattagtttaaaaaaaattatagaaaagtgtggtaatggatccacatgaattatatttccaatctattatttttactttagctgtttagtagtttgtatttacatacatatgtaaatacatttttgttacatgcaattattcaaaagggaggtaatataataatggctattcgaaaacatttaattactcttgaggatcttactgatagtgatattaaccaaattgtaactcgtggggtagagtttgccacaggtaaatcgcaacctaatcaaatattagcgggaaatataattgggatttacttccgtaaaacatcgactagaactcgatcggcattttctgttgcagcattaaagatgggtgcacaaattgtaacgtatggtccaaatgatttgcaagaaaatacaggggagtctatagaagacactactcaagtactttcgcgaatgctggatgcactagtagcaagaactgcagatagtcaaaaggaaatggaaaagctggcatctcaaagtcgtatggcagtcattaatgcaatgagtacggaagaacatccaacacaagcgctaacagacttaacaacaatgaaacaaaaatttggtgaaatagctggattacgggttttatatatgggagaaggtaataacagtgctgcagctctagctctttctttatctcgttttccaggtacggagttatatctttttacacctgctggttatggagtgtctccaagtgtgcttgaaaaatcaaaagaatatgcacgattatctggtgctaaagttattgaatgtcatgatataaaaatgttacctagtgaagtggatgttgtatatacaacaaggtggcaaacaacagggacaagcaaaatagatcctttatggaaagatgcatttaatccatttgcagtgacagagagaattttgactttatatccggaagctactttcatgcatgacctcccagcacaccgaggggaagaagtagcagcaacagttattgatggaccgaaaagtattgtatttacccaggccgaaaacaagctaaatagtgctatggcagtacttgaatggtgcttagcttatcgatactaaagaatctagcatttattgtctttcaggtataagttctatttgaaatacattcgaaagaacatttacaaatattatctttaattatttttttagattttaaccaagaaaggaagcaaattatgctcaagaaattagagagtttagaaagggtaatcggcaacacacctatgattaaattagagcatgaaaagattaatctgtatgcaaaactagaatatcacaatttaatgaatagtgttaaagtgcgtgctgctcaccatattttaaaatcagcaataagtcgcggtgaagtgactgaaaattctacaattatcgaatcttcatctggtaactttgcggttgctcttgctactctttgtaggtatatcggcctgaaattcataccagttattgatccaaatattaatgatagttatgagaattttttgagagcaacttcctatcaagtagctaaagtggatgaacgagatgaaacaggtggctatttattaacgcgtttaaataaggtggaagaacttttaaatactattcctaatgcatactggacaaatcaatataataatgctgataactttgaagcccattatcaaggaattggtggggaaatatctaatgattttaaacagttagattatgccttcattggagtgagtactggaggaactatcgctggggtatctacacgattaaaagaaaaattccctaatattaaaattattgcggtagatagtcaagggtccattatttttggtgataagcctcgtaaacggtacataccaggaattggtgccagtatgatacctggtatggttaaaaaagcattgattgatgatgtaatgattgtaccggaggttcatactgttgcaggttgttatgagctatttaataaacatgcaatatttgctggtggatcatcagggacttcatattatgcaatccaaaagtattttgaaaataaggatgttcaaaatacacctaatgttgttttcttgtgtcctgataatggacaagcttacacatcaactatttacaacgtagaatgggtagaatggcttaatacacaaaaatcagtagaagaccaattagtttctttataaaaatgatatagaaatgaggaagcaattatgatgtatttaaataccaaacatatcaatgaaatgggtgttaattgggaagaaacaataaatgtcatttcaaaggcagtaaaaagtcttgatttagatgatttttctcagccaattaagccatacttacgtttcgatgatccggctaatagaattattgctatgccagcttatattggaggagaatttaaggtttcaggaatcaaatggatagctagttttccgaagaatattgagaaaggtattcagcgtgctcattcagttactatattaaatgatgctatgactggaaaaccatttgcgacgcttaatacagcaatggtcagtgtaatacgaacagcttctgtaacagggttaatgattcgagagtttgccaagttaagagatttaaataatgttaaagttggaattattggatttggacctattggtcagatgcatttaaagatggtaactgccctattaggcgataaaatcgaaagtgtttacctatatgatatcaatggaattaaagacgaattaattcctgaggatatttattctaaaactcaaaaggttaatgcttatgaagaagcctataatgatgctgatatttttattacttgtactgtttctgcagaaggttatattgataagaaacctaaagatggagcgctactactcaatgtttctcttcgtgattttaagcctgatatcttagaatatacaaaatccctagttgttgataattgggaagaagtctgtcgtgaaaaaactgatgttgaaaggatgcaccttgaaagaggtttacaaaaagaagatacagtatcaattgctgacgttgtaatccgaggagcactgcaaaacttcccttatgacaaagcaatattatttaatccaatgggtatggccatttttgatgtagccattgctgcttattactatcaaagggctagggaaaaggaaataggtgttttattagaagactagtaaaattattaaacgtagtttgaaataattgtctaatagctgctaaatatcggtaaacacgactaatcattatagaaaattagttatttgataagcttagaatttatgtaattatttgaggagctgtttttatgagtgaaattatttcggccttagatctcttacatcccaagcaaattcgctttcatgaatcatatgaacacaaaagattggaacaaatttgtcgtgtaatggaaagcgaaggtgttttacggaatcctcccttagtatctgagcttagtgatggtaattatctgttacttgatggtgcccatcgtatgaaggctatgatggcattaggttgtaaacgcgttgctgtacaggtagtacctgatgaaaaaataaaaattcgtgcttggaatcatttattaccaatgggggaatgggtaaataatttaaagaaagaacctacaataatttggtcaggtaagattattgctaataaacgtttgcttgcaaaaattacagaagcaaataaacaagtacattttttatatgcaagggatttaaatagcgatttatttaatcatttagagatatggcatcgtattgtcagcttatatcaacatgagtatacggtacgccgtcattcaaatgatactgaggtctggcctcattcaaatgaaatattgatgagttatccagaatactcgttgatggaactgaaaaaggtaattgaagcaaagtttttaatgccagcgggagttactcgtacgacgcttagtggtcggttattgaatttacgtataccacttcatatattgcgtacggaagtatatcctgctggtgaatgggaaacgttatgtggaaattggtcaaaatgtttacgcctttatgacgagccaatatatgtttacgatgcttaatatattgtttaatgattatgatgtatattttttatttatttgtaaaaatttcattatatgatttatattaattccaaaatatttttattatgttataaaaactttttgaattagtatttaagactaatctaagagaggtttgttatcggatggggtaaatattaccaaaaaagataaagtggagatctctaaaaaattaaaaactttcttgggtgatcaatattcacttgaattaggagattacataagctttgagatacttgaatttataataaaagaattaaatccacattttaatctagctacaaaaaataggttggaaattctcttgaaaaatatagagaaagagatatatagtgaattagtttcacatgaaaataacaaagtataggcaatattacatgtatttaaatgtagaatagtataaacctatatctacataatgtgttgctattaatttggtagaattgcgaggatcaagagagttgatgatatacaatttttagaagagatgggattgtgaagtgaatatacttgcaatttcatctttttatttttaacatgctttttgcaattcatgattaaaattttctgacgaagcattatactattaaaaaaagaattgattatcctattttatggtaaaatattcttgagctatatcttctgaaaatctattttttacaagtttaattaatattcttaatcgttattcaggtattagaagaattatttaaattattaaacagcattgattattaataaatttataaaattttaaaaatattaacttggaaaatagcctttaaattttaatgatatagtaagtgagtctcctttaattatattaatatagttaaatatcctattattttatttttctataaatatatttttttttattaacatttaatggtatattgtttttagataatgttgtggtaaattattgaatttataacatcattttcaaaaaaataaaaggtaggtattgaaatggaaactgaaaaatatttacaagtcgtagaagatgaagagattgaacaattagttggtggagcaggacctggttgggttgaaactttaactaaagattgtccttggaatgtgcctgtagcatgtgtcacgattatgggacaaagaatttgtaaaaaatgctactaatagttaaagagagtaaggcgaaaggccttactctctttaatgagaatgaatttctaactgtttctcctacctataaaaagaagaggttattatgaaaaataattcacatggaattttgaatacaatagataatggatcacattctttagtaacaaaagaatatctagaaaaaaattttgttatctttttagagggtttttcatgtaatgatgtcattaaggatgacgaaaactataactttcaaaaaataatacaaacatatgtagtattctttaaaaatatgataataaataaaattgatttttttggtaattttgagaaggtttctgaatcgataatgtttgatttagaaaaaagactataccaagtattaaggccatccttaattgtatacataaataaacttagggtagaaaatgctttaagaggaatggataccaatgaagaatataagtattttacaaagaacttctttcattttaaaaaattttatatgaatttttttaaaatattacccgtattaaacgaaaaaatttttacaatcattgaaaatgaaataaattatatgatttggttgcaaggtgctcttgaaaaagatcaaaaagaaattcataaaatgtcgggttttaatattatgcatgtagaaaaagttattaacctaggtgactaccataataatggaaagagaacaattcttttagaagataaatttaataataaggtaattttaaaaccagtcgatttgaaaaattctatactatatcatagtttaattaatcaactgaataaagatttaaatacggatatctttattccgcaagtagttaataaaagaaattatggatatatggaatacattaatcatgaatcatgtgaatctaatgagcaaattaaagattattattataatttaggtgtagtgctttcggtaatgtatttgattaatggaagtgacatacataatgaaaatatcatagctaaacaatcctcaccagtcataattgattttgagacattaggaagtacattaaatccaagtgttactgaagaaaccagtagttttatattatctaattcagtattaaattctagaatgctacctataaggtttagtggaggtagggaggtaataagagattacagtgcaattgggagagtaatgaagtctttggtaaaaacaattaaaataaaaaatgaatttacatcgaatccaattgaaataagagaagagacaatagtagaagatacggttcagaatttaccgtttcttaacgatgatatatacgagtatgataattatatagatgatattattaaaggttttgagaatgcatataactcagttttaaaaaacaaagaggagtatatgtgtatattaaaaaatagtgtttctaaatggaattatcgaaaagtatatcgaaatacaaaagtctatacccttttattagatagactaaatgttccggatttattagagaataaattaaagactataaaatatttgcggaatattcttgaaaaaaacatatacttggctactaggaaagatattattcaaaaagagatagaggcactattatcctatgatgttccatatttctttaataagtatgaatgggagtcttgcgaaagtttatcaaataatgaaatagatctagaaacaaaatttaaaaaaatttcatatgctgactttttattacaaagaaaaattatagaaatatccctttctaatcaaaatgacaatctatataagctgaatacagtaaaggaaacaattaattttcgaactaatttacctacaaataaaataaaggaagcaattacagggaaaattcttgatggcagttatatatcaaaagacggtgctgtagattttattggattaaaaacaaattggcaaggggagcttgagataaaccatttgaatagtggaatatatgatggattattgggaataagttcattattgagaaataatgctgatcctaatcagattgaaattataaataaacttgaacaaaaagccctgcaagaaatattaaacaaaaataaaaataattatggttttgtaaatggtgttaatgcaattatttcttactatttaacaaatttaccacatataacatctatcgatgaaagattgatattgcaaatatttatggatgtcaactctgatattgaaaaaggtaaatatagcgataagcattttgatatattagggggttcagctggtctaattttaacggcagttaagttctatcaaattaatcctaattataaaatattgcttaaagtggctgaaaatctcggtgactacattgtcaataatatgcaaacacataatgaatttgtatattggaaagctcacgatactctaaatttagaggattcattaaaggggtttgttcatggattatcaggacaacttctcgcattttataagttaaaaggcatattaaaaacaaataagtacgatagagtaatacatggtatacataaaagtgagaaaatgagtatgagtgaatatgagtatacagatagctggtgtaaaggatttagtggaatgggaatctcgagaattaaaattttagaatcgtatcaaaatgaggatatacaatcagatttaattttttttaaaaaacaaatcttaagtacattacatgaaaatagtgattattgtttatgtcatggtttaatggggaaactagactttttattggagctagaaaatggaggtatgctcgagcgcaatgaaaaacaaattgttatgaaagtaacaaataactttttgaataattttgatatagaagattttaatcctcataaaatcgcattatttacagggctaggaagtattttgtattttttacaaaggttagaggataataaactaaatagcattttatactttaatgcctagaataggtgataaatatgttaaggaagaaaattaaatttataccgcaaatgacatcttttgattgtgggcctagttgtctagcaatgattatgcattattatggttcagcagtacaagcttcggaaattagaaatagtaaaattatcaataaaaaatcggcatggagtttgttggatattaaaaaagttagtaaatcgtatggactttctgcaactgcatataggatagaaaatataactgatttacaaaggatacaaaagccgatgatagcattttggggctttaatcactttgtaattattgaaagggttaaagcaaataaattttatattgtagatcctaaggcagggccgatgataattgatataagaagttttgaggaaatgttctgtgactatatcctagtaatagaaaacaaaaaagatatacagccaaatactaaaaggcgtgaaaaacatatattacttagatatattgatcattttgtatctcctagccagattgttttattagcactattagcattgttagcacaaatctcaattcttgctttcccctttattttgaaaaagtttatggatattttgaatgcttcaaaggaagtggatgtaagataccttttaattattttgggaagtttaatcgttgttatagggataaaatctataacttctattataaaagtaaactttcagaaagaaattgatagaaaaagtacaacaaaagtttttgagcatatgtttaatacccccatagaaaaaattactacacgtcatgcaggggatttaaatgtaagaatcatgagcctagaatcaatacgaggatatattttagaggatctaattgaaatgattatatcaatagtagttatcattccattattgatgtatctattatatactgagactttttatactttaatattgatgttttttattgctagttccctatttatcaatatttccttagggaaattcatatataatgctaatttagtcgaaacgtattacctaggagaacatagagggaaaattaatgaatcattaaaagcgatgtattatgtaaaggctacagggattttttctagaattaaatctgtatggcaaaaagattataataaatacttagatacagtacataaacgagcgctaaaacaaaatgctttagaatcatttaatagttccctatcaacaatatttattatcataatgcttgctgtaggattttataattttagtaaaggagaaggggatttaagtaatattttcttctttattgctatatctagtattatattttctccggtttcaacaattataggatcaattttaaattggaattcagttaaaccacttttattaagaactttagatatcttggaagaggaactagaaaaagatggatcggatactaaagtaaacattcttagaggatcgattcaatttaataatatttcgtttagttttgatgacaaaaaaataatagaaaacttaagtttgaacattaaaaataacgaaagtattgctattgttggagaaagtggcagtggtaagtccactttagctaacttattattaaaattgcatactcccgataagggtaatatattaatagacgatagagatattaaagattggaacagtgaggaactaagaaaaaatgtaggactaatgactcaggatggagttttatttagaggaagtttatctgagaatttatcttactttgatataaattatgatccttcaaaaatccaggagtctattgataaattgaatctgagtaattatattcaatttcaaagtataaatgatattttaatctcagagggaggaacaaatttctccggtggccaaagacaaaggttggctatgttacgattgttcatgaaagaatatccgattcttattttggatgaaccaactaaccatttagatagggaaacggcaaatgctgttattgaaaatatatttgccataccatccactaagattattatcactcatgatgaaaatattttagagcgtgtagatagagtttatgaacttactgataaaaaattaaaacaacgagaaatattttctaaatccaaattgcaaacattaggtaaagggtaaatagaatatctaatagatcaagaatttaatagatacttacttttatttgagaataagaaagtgaggaacaaaatgaaattagcaatccaaactaaaaatttaacaaagtcttttgacaatcaatccattgtaagggatttaaacttatctgttcctgaaggaagtttatatgcttttattggaccaaatggtgcaggaaaaacaacaacaatgcgaatgctattaggattaattccattagataaaggaacgatattatttaataataaagatatcaaagattggaaagaagaattatttgaaaatgtgggttgttttattgattcacctacctactatcctaatttgacagcatatgaaaatttagcctatgtacaaaaaatgattaataagcctttagatgaaatagacagagtattaaaaattacaggaatatataaagcaaaagataaaaaagtgaaagatttttctttaggaatgaaacaaaggctaggtatttcctttgctattcttaatgatcctaaaatactaattcttgatgagccgacaaatggattagacccagagggagtacacgagataaggcgcttattacttcatttagtaaaaaatgaggggaagacaatatttatttctagtcataatttagctgaaattgaaatgatagcagatcacatagcattactacataagggtaacttactctatgaagggaatttaaacagtattattacttctagagaatatattgttcatgttaatgacactactgccacagaaaggattttaaatacaaaggatataccttatagcatagaaaaagaaggggtattcaaactaatgatagatcaaaatagtgttcctaatttaaccagaatattaattgaaaatgatatagatatttttgaagttagccctaaaaagctaacattagaggaagtatttttatctttaactaaacaaaaggagttactatcataatgcaatttatctttaaaagtgtgaatagtgagatgaggaaaattggtgggagaaaattattgttattttctttgtttttttcattattatcaagctttttgtgtataagttattttatttttaacaagaataatcccgatatgtttcaatctaccaatcttatagcaattacagtaaactttaatacactaacattaagcattttttctgcttgtatgtggtattttatcatttcttctgaaaataaatatggtacttgggctattatttatacaaaacccatttcaaaattcaagttattggtagctaaaaatttattgtttatactgttttatttaatctttaatattttaaatttttcagttatgggtgtctatatttttataaatggatatgaaatatctatactgtattttttaaaaatgttgttactttgtaccattttatctttagcaataccatattctcaattgctttttcatttaattataaaaaagggaattcttgcggcgtccttgtcagttatttggattttttttagcgtaacttatggattatttcctgtagtattcacaaagacatttccaatattttatgcattgaatatagtaagtgatgtaatgatgaaagaaacaactattttaatatatcttgcaagttcttcaatctatattttaggaattatgttattagctgtgagttttaaatattatacatatgaataataaagggtgaaataagtgggtatattaggtgaatataaaaaaagtcttcataatggattgtatatcctgttactagtatttctgttgataccaattagttttcaaatctttctaactgtatcatctcaatcaaaagatggcgttttcatgcatatagcgattctaagtcttttttgtagattatttttacctattgcaataggtctattagtgtcattttcttttgtaaacgaattcagaagaaaaggatatatgtctgctatttatcatggaatcactttaaaaactatattaagtaataagtttttgttttgcttaatgattacctttggttatttaatatgtgctttagtcataactagtatacctatagtattaacggctgataatcttgggactgtttatcaaaggttaattttttctatactttttatggtgattagctctttaactattgtgaatctacattttttaataaatataatattttataaaatcccgttactttcattattagtaggggttataggtggactgggtagtttttttatctctcatacaaactattggatactgtttccttggtcatatccaattatgagtctttatatcgatagcattgaaccaaaacagttgtatattattcttattgtatatctattatcattactaagttgtatatttattattaaaaaatcaaggcaatggaattaaagttaaaataagaagagtagtattattaataataaagcgtgttgtagttgctataagatgaatctcgttacgttaagtgaagtaataagacaagctgattaagtattattgaattcaaagaagctcaaatatgaagaatgtaacttatggctgatagaatatctattaaaaattcaccatatgaaaaaggtagctgtacaaaataaaatgtaccctatagaatagacacttgaaaaaagtctattctatagggtatttcttgtataataaaaggaaaattttcttgtcgtacacatcatgatagggatattaacgcaagtatcaatctaaagaatgaagcgataaggcttctaaccgcaaggactgcggggttagcctaatcaattagagttcgatagaactctaattgattaggaatccctcacttctaaacgaagtgaaagtgggggtagttcaagaaatggccaaagaactcaattccaacttaacactcaaaagaataggatatataacttaaatcatataaatatacagttaaattacacaattagaagcaaaacataatagatttgtaatggaaattacatattttcttgattttttgatgcattttcataaaataatccatgtcgaaaaaagtcgaatgttcatatattatctttgtttttcagttgtaaacgctttattgttatgatattatcatagtcgaacaatagatggtaataagccgtaaaggatttctttgcctatgcctcgtaaaattgtacggataaatcatgaaaataggctataggtccaatggaatatgagatatcttatactatattcaacgaaatttcatcgctaaaaatactgtgagctcagttaaaccaactttttcattatgtccctaactagtttttacaattcagcttaaagattctcagaagttaactcatccaatttagtaagctaaaatttattctgtatctatgaaacgtgagcaaaaaggattctaccaatagaaaccagctaagtgattaaagatatccaaaatattatctttattaccatctatagttaattacgtatttaccaactataaaaaaagaacctaggtaggttctttttttatttcttaaaagatatatttaaatttttcaaggtcattacacttaataataatattgccatattatcaatatttatcttttttataagaataaacttttagtaagtaaaatcaaaaatcccaacttctttcctacattagaaaaaaggtattgaaaatatccagaataaatattttcaataccttttttgacgtaatatgaatcagaaaatctataaaatgatagcaatcacataaaaaaagcaattcataaaaactttcttcttttataaactggaacgtttggatcgttcatgctcataacgttcattaaccatatttttcaattcattccataataatattgtttcatcaattcccttgattagatcatctatgctgggaactatactattattaattttcggctgaaatgtaatagtaattggatcatctcacatcttaatttcctcatataaaatgttttataatcatatgcatcagcagctgtgcccaagttatcagttattttatctaatacacttaaaaattctacatacttctccctatgagcgccatcaaaaaaaggccctttccacatcgtccaatgctcatacaaagtatcaaaaagtaatgcccatccgttatgtactctattatgagaaaatgacttttgatctaattcttgtgaactacccgccacttaacgtcctaacggactgtttgaagtgggggcttctcggttaatcattacttttaatagctaacgaatttgtccttagacagccgagctaactcccttgttccaaaggttattttattgctatttatcctaacgctaatagtcgtattgcttcatttttgatattgatagctgcgttataatctctatcgagatttacaccgcatatacaagaatagattcgttcagacaaagtcatatttttcatattcccacaattgctacatgttttggtggaaggaaaccatttgtctattttcaaaagttgttttccttgttcgtttagtttataagctaagaaagaagtgaacataccccacccattatcagcgacactttttccaaaatgaagtgcttgcgacattcctttcatgtttagatcttcaatagctacgacatcaaaatgaatagctaactttttagactcatgatgaaggaaattcttacgttagttagctactttctcatgtaatttagctacacgaatacgttgtttctgccaacgctcagaacctttattgcgccttgataatactcgttgtgcctttgctaatcggtctaacatgttacgatagaaattaggataattggctttctcatcctcagaactaacgtataatccatccatcgcaaagtctaaccccacaactgtttctacttctttttgtacaatttctttttcatattcagtcaagatggacacatagtatttacccgtaggagtcatagaaatcgtacatgacttgattctataattttgtggtatctctctatgttgtttgatacgtaccattttcaattttggcaatttgatatgacgatttagcaacataatatttccgtttactacattcgttgtataagactttctgtcttttttacttttgaatgttgggaagtcattttgaccactaaagaaattcttataggcagtttgcaagtttatttgagcatttgccaaagctaatgaatccacttcttttaaccactcaaattctgctttatatttcgcgggagttggaggcttttgtttctttagttgttccttatcatctttgtatttttcgtacgcttcttttcgttcagctaacattctattatacacaaaacgtacaaaaccgaaggttttacgcataagatatgcttgttcttctgttggatacaaacggaatttatatgccttattgtgctttgtcatatcatttcacctcactttccaccttgattttcaatatatttctttactacgtttattggagaaccgctagtagttaataagcaaaaacttcttgaccaaaacatctctttccaaagttttgttttcactcgtggaaagtctctcttgatgagtcgagaacttgcacttttataagcattaataaattttgtcatttctgtattcggatgagccttgaacaaaatatgaacatggtctacatcatgattccactctaccaatgttatgttataattctctgataacctgacaaacatatcttttgcatagtctgatatatcatcattgaacacatttcttctatatttcacaaccaatacaaggtgataatatagcaagaacaccgaatgattattattattattatctaatttcattgatataccaatcttcattctttataagactgattctatcagagggaaaataaaaagcaaagccttttggctccgccaaaccgaaatttatctcccacctatcgtcgggctacgcccttcacacgcttgaggaaggagacttctttcgggaaatacgttaaaatttctagataagtagaaaactctttgtcattagatttaaatccttgtataatctctattttattctctacaaacaattttttcttttttctccttatgaaaaagataaggtcatgctctccaattttatcttttctatttgtgaatttgtaagacaaaaaaagaatccttataataaggattctgatatgctccctattaggtagacagataaaaaataaaaatctgttatctaaggggagtattttttatggctagaatgaaatattctaaagctgaaaaattggcgattttagctctttataaagatggtcatcattcaatagctgacattacggcaaagttttctgttgatcctgggacgattagagattggaaaagaaggtatgaagtgaatggtgaagacggcctagaagaagcactttcttggaagcgttactcaaaagagctaaagttagcagccgtcaatgattatctatcaggacacgattcgttaaacaagattatccaaaaatacaatatatccagtactgcggttttgagaaaatggattaaaaagtataatagtcatagagaactaaatgataccggtaaaggaatgacaaactctatgacaagtagaagaaaaacaacgttagaagaacgaattcaaattgtgaattactgtatacaacatcagaaaaactatcagctcactgccgaaagttatgaagtttcttatcaacaagtatatcaatgggtcaagaagtttgaagcaaatggtgaagaagcactacaagataaacgcggtcgaaagaaagaagaatatgaattaacagctgaagaaaagtttaaactggaaatgaaacgtttagaacgagaaaatgaacgattacgtgcagaaaatgcttttttaaaaaagttagaagaactcgaaaggaggcgtcgttaacaagcgttcgtctacaaaataaatatagagcgattcaagatttacatgcgcatgaaaatttggcagtaatccttttatgtgaaattgccggtgtatctcgtgctgcttattataaatggctacagcgtacgccaacagctagagaattagagaatgaagcaattcttctggatattcaagctatttatgcacgagtagaaggcatttatgggtaccgaagaatgaaattaaatattaatagaatgtatcataaaaagtttaatcacaaacgcatttatcgcttaatgcacattgctggattacagtccgtgattcgtcggaaaagaaagcgctatgttccctcaactgcgcaatatgtcgctgaaaaccgactaaatcgtgaatttactgcaagcaaacccaatgaaaaatgggtaacagatgtcacggagttcaaattaggaaacggaaggaaaacgtatttaagcgccattttagatctttatgatgggtctattattagttatgtattggaacattcaaacaataataaattggtatttcaaacattggatcaagctatcactatattaaaagagaatgaacatccattgattcatagtgatcgagggtatcaatatacgtcacatgggtttaagagaaagatagaaaaggcaaaaatgattcatagcatgtcacgtgtaggaaaatgtatagataatggaccaatggaatcgttttgggggacgttgaagtgtgaaaagtattacctacataagtatgagacatttgaagcgttacaacaagcgatagataattatatccagttttacaataatgaacgttaccaagaaaaattaaacggcttaagcccattagaatacagggttcaagccgcttaaagtgttttttattatttccactgtctacttgacagggagctgttcattctgcaacaggaaagatcgaacatatattaataaaaagaattactcatattataatttgaaaataagccataaatattaagaaattttataacgaattgaatattcgcactaactttattataattgattaagagttggagtagtaatctgtcatctgttcctttattttaaagaaggttgatttcaaccttcttttttttgttgtttttccctcctttaaaaaaaggaaaaagaattacttaatgattgtggaaattgcttttttgtagactagttgttgcttgccatgaaccatcataagaatggcaaatttatccgttgcaataatctgcccaagtataggaacctcactctttaaaaatatagtaaaattccctttttcttagtaacttaattccatttaattatctgaatataggtaagtttaaaagagctttgaacacgaaaaaagcgaaatcctataattttttgttcagtattaacgtgtgcagaaacatacaattttcgcgaaataatatggtgaacctttacaattaacttcaggctatatgtctaaaaatatattgaatttatctctaagtatttgataatattgtttcactgttatttcttttttagacttctttccgtgccgagtttcggtaaaacttttctcagtaagtgcaatatgaccgtttccaattaatttgcaaataatactccccttatttactggcgattctagatgctctataaccatattttgtatagcatttattttcttttcatcaattgcatttaaataaaaagcgtagccgatagaccaggtatcagtaagatccgaatcaagaaaatgagaagtttccccatttttcccttttttcatttcaaatacataggtccctttctctgtattttgcctacgaacacgatattctcccgttacagaagtcacactgtcaccatgaaaaggaacaggatgtaaaggaagataggatgcaaaaccagcatctattatatagttttcatttttgtgctgtaaaacgataagtgcgtgtccatcatccgggttccactttcctattttcgaatcataaagggttccagctattcgatacacattaaatccacaatcacacaaaaaataatataataaagaattaatctcatagcataatcctccacgattctttaaaagtagtttttcttcaatagtttctctagaaaattcttgtatatttccttccatgatgtctatgttttcatacggtaataagtgccccatctgtaaaagaattgtatgcaaatcttcaaaattcacattttcttttggtggaatttttaactttaagaaaaacttttgttgtaattcagttaacattatatatccccttccatttataaaaaattcatttaatattatattaagaataacggttataaaatatacagagtgaataacaaatttcagagaaccgtgtaacattaaacattagcggacatttagaagcaaacactaaaaaatctcttattttttttaatccacatttttgttatttgggtatttttatttattctgccaaaaggagaataagtttaattcagaagagagctaaatgtgatttcaaaaagtgtatttcgtgatacatctaagaataaaattttttagatgtaattattattaatttgtatttttaattaaattttttatttaaagtccattagttacaggtaaattatgtaaatatttgcaactttcgagtagcctttaattcttctatttatacatataatactctttatatcgttcgaacttcgatttttttgtttgtggtggtattatggatgactttaatgatttagatgatgctacttgctttggcatttgtaatacgccccgtttcttgagctctctatacaaattactcacattgcacctcagtttttttgcaatagttggatattcctctccttgattaaataattgtactgcttttttacattttgagtcccatttttcttctgtcgtttgaaatttttgagttcgttttttaactatatttttttctaatttaattctctctcgttctattttacaccgcttggcacaatactgttctgcgtctgcatgacttccgaaatgctcctcctgtaaacgtatcatttgtacttttttcgcaatttctctcaatttacagtcacctcattttgtttagtgaattctacaagaacttgatcccactttataagtaggctataaatgctcacattacccttaagatagcttttaatatactatttcgaaaaattataatcatctctatttttacataattgtaaactatagtaaattgataatgttgacacagaatattctaaaccttaattctcactatacacataaataaactctatatttcctttgcttgaaaaatggagaaattagcccaaatctaagttatagatgtatacacctatctttattacaaatactttacctattgtagctagggcgcaataaaaaagaatgcagacatgttttgcactcttttttattaactcttatattattttttcaccacagtcagctccttaaagctcaaagttcttaaatgactctgagcattatttttgtatgaattaaagattttacttaattaagattagattactatagataattgatttttttatattaagtttatatttttttgtcaaaatagtttagagattcatgtccttgtacactagcagatgggatatagatgttataatactaattgtatgaacttaagaaatcgcacttatctaaatataaactttgtttatttagatactccaaaaattctactaatacataaaaattaaggagtgaaagtaattgaaactaacacatgccactttagagatggattctaatgggaatattcgtaaagaagataacatggtcacaatcattgtaaagccagacacaggtaactctgttcgtttattttgtaagattgatccagatcaaaatactcttattgcttttaatacggccattatgggtattgtctgtccttgttgtaattcaaacacatttacatgttctacactctataacaaaagacataaattacttcgtgaagcctatgagcttttaaaagaaaatcattctattcgtttaaaattactatatgaccaatttggagaattaacagtaaagtgaatttaaccatacaccagttctctattcaatagcatacagaatgtaataataattcttcaatttacaataattatctcatataatgtatccgttaaaagtgtatttaacgaacagtttgatggatttcatagaattgagtatagtagaggtatcaattatatattgatacctctcttctttttcaaaaactattatggtatccatatatgtaatcaagttatttattaaaatagcattctagctcaaaaatccgaatagttagtttaaatatcggtttaagtattagtttaaaaaataatttacattatttgatttgatgtgtacaacatgagtaaccaagaaaaagaaaagtttaaaatactaatagataagcataaaagtaaaatgccctagtatatcatagagtatgcagaaatgaaaacagccctctcccccgctacattgtatgcttacattactgaatttgaaaagtttctaaaatggcttataagtaatcgattagccgtcgaaaacggtaaggtggtcactaatatatgtgatgtaccaatttcaacactagaaaatctaccattaaatgaagctagaacttttcaaagatatctacagggagaaggtattgagacaagagctattaacagaactttctccgctttaaaatccctattcaagtacttagctctaaatacagagaatgaacaaggggaaaattacatctctcgtaatgtaatggagaaaattgaactgcataaggagaaagtagatgcagcagcaagagcagatgacgttgcaaacatgatatttaatgaaaaagatgatgttgcttttcttcaatttctagcaaatgattatggtgaaatattgaaagatatatcaccaaaaaaatataatttttttcagcgtgataaagaaagagacatagccattataagcctcattttaggcactgggcttcgagtttctgaggtagctagtcttactatatctagcataaacttccgccaggggaaagtaaaagtaacgcgtaaaggtaataagagatcttccgtattagctactcgctcttgcttagatgatattcaggagtacattaaggttcgtcctagtaaatataactgccctcaagatgaagacttactttttgtaacaaattataaggggaaatatacacagttaactgttagagctatacagaagttatgtgataaatattcaagtgcatttgatgagaagcgtagccctcataaactacggcacacatatgctacaaatcattataaggaaaacaaagacctagtattactccgagatcaacttggccacacttctgtagaagttactagtatctatacaaatattaataatgagaagaaacgtgaggctgttgatcgcttggaaagaagacaatttgaataaaaaatactaataattgcacaaaatcaacattttgtgcaattatttaggggaagctacattgtcatagcttcctcctcttcattaaagtatccgataaaacctcttcactttttatcccattcaaacaaattttctaaaatctcctcagcctctctagataagacattcttcctacagttaattaataactcagggagagttgtttgtaaaaataaccaaaatgattcaacatgcgctgctacaaactgattacctttagaaagtacacactcgtgtctcaaagtcctccaatattccatttgtgtaattatcaattcgctaacttcaaaataacaactatgtgattttcctgtagtaattaagtcgaatacttttctttcccagaattcatcgtttggaatttcgtctgttttcttctttcgttccctaccatacccaatgggagcatatgaactttctaatgctctgtgcttcactacacttaagaaaaataaatatgacatgatatacgctgacctataagctcctgctttataacataatattccctcttcaataagacccatagcagcttccggaaattctatttcactaataaacttttcaatctctaatttcactttcttttctcctttaactttttcattatttaaagaacattagttttaatttctttttataataatattaggaatttatgatgttaatatgacaactcatctttcaactcttcaagatatacatccctaactaatttacaaaaacctatatattctccgaaataatcgctaaattgctttataaacccttctctttcttcaatattatgagaccatataaacatactccccatcaattcacctatctccctttcaatttcttttaattcatctggcgatataccttgcgggtaatcattaaaccactccaaccaatcagaaattagctcctccacagaggatactccggattctgagcaaaaattaaattccctttttcctgctgtaataaatccgtctaaatcatttaaaattagacggattatatatgaagtactcacatttccgatactatgtttcatatattctcctccttatcatttttttcatccaatgaaatgtgtttgttataccatctatttatttttcccttgtaatacttttcgacttcataatcaggaatccaaattttacgatcatagattttactcattaccctttctaaaacatcctcatgttctctcgctttcaatctacggttatgaactttaatcttctctatataagcctctctcagccaagttgatatggtttcacgctgtttttgctttaggtgagaccatttcttattgatttgcaatagttgtccctgagggctcctgatatgattctttattgctcttcactccccaatcgtattttttcttatttgaaccaaagacgtagtaggcctcgaatcacggcatacgctttaacaattttacgaattgaaccttatgaaaacatccaatcaataaaaaaaggactagatgataaatcctagccctttttattatacattaaattagtgtatcaaccaccgtgatctccaactgaaagactttgaattacttcgtaagattgtggagttttcgctgtattcgtcacacctatagtcaaggttatagccgtgacaattcccattaaactgaatactatttttttcattttaaagctccttcctcaaaaaattttcgtttcgctttcaaccctaaatggaaatacttactcgcctcatgatgattcttttcgtcataaaattttgttcccagcgtctcataagactcttgaacatcttcatacaatccttctctttcgaagtaatcaattcctgctagcactacggtttcgagcttttgagtaggtgaagcattgtttagctcttgtaaaatgagatatcgatgtatgaactcttcttgattaagtttcttactaatatttaatccattttcaatgagttctgctgcgacatctcgctcgtccagtttgtaatgttccaatgcctttgcatacatggctttgtaatggtttggagaattttcaacgacttcagataaataacgaatcgctaaagatgatagattttgtttagaatacatccaacccaagttatggcgcaccataataataaacttatcttctccgactttttggaacttgtccattgcggccgcaaaatgttcctctgctaatgaccattcttttaagtttatacaagctaaccccaacaagttctcacaaaagccgacattacgttcataatcagcatgggctaaaaacatttcttttgcctttgttgtgtactgaaaagagaccagtgaatcacaaatatcaaaatggaatgcacctaacttataataaaattcagctttctcaacgtcatcattgataagctctaataatttttcggcttgatcaaagtgttcttttgcaaccttataactaccagttccactagcatggatagctttaaagaaatgataataataagttaaagtgttgttagaaggaatctcaaaagattctactttatcaaaactacttgtagaaacacctaagttatcaattacatattgatgacgaaaatctaataatgaatagtataataataagttctgatcttttatattttgaattttaccatcaatttcttcttttaaacgatgcgcattgcttatgcgccgtgcacgaatttccacataccaatcatttaataagcccagaatctgttcgtttcctttgattgctatattcataatctaccccctcaataccaattatcatattttcttttaataatataataacagaatttgtaatttaataggtgtatttttgaatatatatcaataaaattcaaaatattaaaactattattctaaaactatagtaaaacaagaacccaaaaatgaaatgaggttcttgttttaccgttcaagactattctataaacctagtacactaacaatctgacatgcctttgaatttacaatatgataatacatctctaatccccttctttccgaacgaagaatcttcccacgcattttagataaatgctgagataccgtagattgaggaatatttaatagctccgttaattgtgttacattacaaatcttgcggtgttctagctccttcacgatttgtaatctaactggatgggccataatctttaataattctacatccgcctctgggattttgtgcatttcattacttgcttgaatagttgtcattttaatttctcctttttagtttccttttttatttttaagttataagtattttgtgtttatatgagtatatcgattataatcgctgtgttatttgttcttttgtctctttatcaggtttaatatataaaagtactatgatggctaaaattccaacaaatgatagcataggtatcgagatgaaaccaaataaattcagataatcttctgtacaagaaactcctactgaacatatcttcatctcactagctggaaacgtttgaattgtaatttgatatacagataacattaagccgatacacgcaaatgggaatgcatacgtgctgacgttcggatcttttctgtacattcctatccccaatattaatactaatggatacatggccatcctttgataccagcacaaatcacatggaggtaacttcatccattcactaaaaaacaaactaatcaacattgcacttatagcgattgtccaagcgcagaaaatatgatacttacggatcagttccattttgtatactccttacgtccatcgtctatcggtacaaaatatgtatttgccttttgaataaaatctagtaaaacatacttatcaggatccatcggctttcttactccgtttattaactgcttcattctagtacttactgtttctattatttcagactcatttactagcatatgaataatagaatcttttgcttgttcatcgaatgcggactgaaaattcgcatgtgatagtatctcttgttgatatgtttcatcctgtaaaaatcttaatataatttcatggctgtatgccggttcaacatgcgaaaggcaatctatgagttttcgcaaaaaatcttttacatgtttattttcatctttagaataatctggacaatacgttccgatatactgaatacctggtgaattagaaaaacaaaaatacggttctaaagatttcgtatcaagcatgtgatactacctcacttttctatttagaatgtcactaacttatttccgtatttggaatagcctgtttctatggatagtatccaatcatttaaatcttcccagtcatatcccttatcttttaaatctggtggaaagcgattctcaaaattatcacgcattccatacatagtttctaatgctttctctagtggaccgaatccatatacaacatgtgttttcactcgtttgtttttcttttctgctacaaccaaatatacatatcgtttttcctttgctaaaacaaacttcaagacccccggcatttgactcatcttcaacttcccctttcagttttccttactcttatcttttacgtatgagtaaggaaaactggtatttgtatcatattaactcaagagatgtctcgtttttttgctctgaaaatataagaatacgctcatcatcacaatatttattacaccagctgcagccccgatttttgaaataacatatacatattcattactactaaacggcaagagactcaaaaaaataaagaaagttgaaataaaaaaagataagaacatgtttcttttgtttccattcatttatggacctcctttttgaataagtatcgatattaagctgcatcattgcggttatagtggcggttcttttcatctacaaatcctttaatgttccacacaccagcccttgtttcttttgcttctttttctgcttctagcatttctggtagcaatgtagtattaggtctagaaatataggctataatcccataacccgatttgatcattatttcgttgatgtgtattccatcacaaaagacataagctaatttcctaccgtatttgtcttctttttgccctcgatcataaaccaaagttacacttttcccttctagctgtttccttaaaaaggaagaggcttcttttcccatcttttgtggtgggattttattagatacagactcaggggtatctaataaaagtaaccttaccgtctgtttctgcccctttacgtttacgtctatcgtatctccgtctttaatatgtaataccttccctttaacggtctctaagccttttaatttccctttataagcttctggaatatcaacaatacctttcccttctacgttctgttgtattccgttttgtactgcttgggcaggtctcgaatcattttttgtttgcacggaactgctacatgctgacatttgaattacgaatgatgttatacaaatagctttaatccatattttcatatcgaaatttcttcctcctacttaaaatacgtaaatagctgcatctaataaacaaacggactattcatagtatttacttctcgataattacaacataggcaaaactgtatccattttggatgatcattataaagtgctgtatatgaccgttccttacactgcgggcatattgacaccatactttcttcattctcttcctgacttttcaatttttcaaaagatacattagcagatgctatattactggtacacaatatatatcccccttttgagtcttgaaattctaaaaatacataaaaaaggacacacctatggcatatgtatgcgtaggtgtgtccttttgcaagatagttttagaagtattttgttactttcatcatatcatagttcctattaattttatatatgaaatttaagattttatgatattatttctttttattcattataaatgtaatacgttgtttttgtacatcataggttaattttgcatcgaatttttctccggttttcttactttcaaatcctgagattgtatcggtcatattcttctctaataacttttttacttgtgcgctagttattttctttttcaaaatgcttccagacacaatgaattcgcaaggatttttgtaatgttcacataaataagtagtttttcctacaattacccttccttggcacaaaggacatttccctatagtacgatcatccgttgttggacgttcaaaacaaatgctaagatcttcttttaatcggatagctgcagtgaattctccgtactctcctttaaaaccatgaatgaagtcagtaacgcgattcttcaataatttcttaatctggctatcagataatttcttttctttaattttagctgatatcgcaaaattacatccgttttgatattctgaacacccaaaaaacttatcacggtttaaaatgtgtcccttttgacactttggacactgacctagcgataattcttcaactgtaggcaaattaaagcttacttcaccatttataaatgctagataagcagaaaactctttgccattagatttaaatccttttataacgtccgttttgttctcttcaaacagtttttttacttgcactgtaggaattgttttgtctttaattttcttaggcaagccaatgttacagttcggatgattgctgcacccgaaaaactttcctctatctaaaattattccatttccacaagggcattggcatacttctatttgttgcttccaggtttctattagattatacgaaactgtatcaggaattcttataatctcttgtgttattttttgtacaaacgcatttgtttgtacaatgaagtctttataactcatttcattcttttcaatacggtgtatcattccttccatttctgctgtgtacagtggatctttaatttgctgaacaggaaattgttcaataaaggcacggccaattggagttgtaataatttttcccttttcaatgtctataaaattcttctcgtgtaaagccggaataaaagccgcttctgttgctacggttccaattcgttttcctttcatcagctcttttaaatgttcatcatcaattttacgaccagccgtttccataaaagcaagaattgagctttctgtgtgtagagcaggtttctttgttttggattccagcaactcaaaatcatagatttgaagttcttgtcctttctgcaggataggaactttaaatgtttccacactttcttcctctacttcctcttggaacacttctaggaaacctttttctcgaagcacactttcttttatttgataggtatttcccattgcatcaataagggatacatctcttaccaggtacactgcaggacgcatgaaattgcccacaaaacgttttaccacgagactgtatagttgttgttcaatctctggacgaccttcctcttgatattgtttagtcgtcggtataatggcaaaatggcttgatacaagatcatcatcaaatgttttgtgttttatatcaatggcgtcaatatcgacggattgtaccagtaaagaataacgactcttagctagcgcctgcataacaccttttactcgttccacttgttctgtaggtaaatgcctagacgaagagcgtggataggttataaaaccttcttcatacaagttctgaatgtatttttttgcagtttcagcattaatttgtaattgtgcatgggcatctttgtacaagtctgttaagttgtatagcaatttaggattttgcttcctagtgccctctttaaattcctcaaccgtgagatattgaccttttagcttctcccctaaactccttaatggcgatgggtttaacacctgatcttctgttttcataactggagtgagtcctaaatttgttactagctgcagatgataataagactgttccttatagttttcaattgctaactcacgttgacggatctcatgtagcaaacacatttgtacacggccagatgccaataggaatttattttgcgctaattttgtggtgcatcccctggttatattcatccctaatagataatctaaatactgccttgctttagcagaataagctagtccatcatacttagacgcgctttctaatcgattgagagctgcttcgagttctacagcttcaaaagaggatttatatacgcgagattgctttttattcacacctgcgtattcgtacacttccctatagattaactctccctcgcggtccgcgtcacatatgttcacggcatggtcaacatcaggtcgctgtaacagtttaacaaggatttgtagttgctctgcattttcttgtatcaccttatacgatggttgaaaaattaagggtaaatgttctaactgaaacactttatactttggatccatctcttccggatttttcagttccagtaaatgtccacggcaccaactgacaatataatgatcattttcgtaataaccgtaataaggtttgcttccaatgtacttttgtgagtgtcggaaacgtggcgatttcataatttcattggccactttcggcttttccgcaataaataacgtttttcccatacatttttcctcctcaaacaaaaaaggacacacctacgctatggttatgcgtaggtgtgtccttttgcaatatgattttttagtattggattaattcaattatagcataatacttcctttatgcaattcatcatttgttagttgcacctccgtatataatacacaataatacaaataaaatattcagaatttaatatatcaacttacccaaaatttaacctagtgtaataacatgataatatgaatatatatataatttcaaaaagtgggagattctaggaatacaaaaaatctttctgtcattttttgtataattaggtttatatgtaagggtttggtaatcgaacataacattccaattgatagcaaaatattacaatattttcaaatataaactacaatgtaataggaatctaaaatattccaaattacaataaaaaggtggttttataatgaaagttaaacagatttcagcagttttaagtggtgcattattacttggtagcctatcgcctagcatttctcaagccgcaacagaaaaacaaacagcagtaaaaacagagcaagtacaagaaaatcaaagtaataaatttattcccattcaaacaaacgaacaatttaattaaacacttaacacaacaaaaacatttactccatatgtaaaagtaaatgcagaaggacttttatatattaatgcaacagcagatgaaattggtataacaaatgaggaatatcaaaacttcttaaatggattaaacttagaaaatgaatacattaaaaaaggatatttcactctagaaaaagatgaacaaggaaaccctggaaaactttccacaacacaaacactaaattcatatgttaataatgacctaagccaattcaaagaattacaatcttcttcagctggtttttatggatggggattcggattaaaactaagtaattctgaaactcaatcactagctgaagcaatggcatggggtagtgcagcaatttgggttgcagccgaattagcagcagctggatatgtaacaataccagcttcagtcccattaggattaattgcggctatagttggacttggagctgctacattagctgttgttaacaaaggaaaaggcgttacagttggaattacgtggacaggacacccacacatacaccgtaactaataaattgaaaaggagaacgatttatgaaaaaaaacattcgattatttgcatctataatcgtactcttaggtcttagtttatataatttggtacctaatttactgatcaagaaatcaattttaattatactgatcctgatttgtatagcagttagtctagaatatattttcaacaaagaaaaatacacctacttaaataaaaacctattaatctttttaaaaataattcccttagttgtagcattttttataacatggcttttctttttaataagtgctacataaaacaagaaagaacccttttttatctaaatagggttctttcttgtttccctcaaatgtaaaggcaacattcttggggattttcataataaaaaagatttattttaaccttatgcgaatactaaagtccatttcaattgaaatggactttaaaaccttttattagaaatcttctactcttttttcttcattacaaaatctttaaaattccccctaagcttgtaatacttcatgttaagccgaatagctactatagagattacgataaaccctactacatataacatgtctctatctccatttcttattgtttagcaaatttattttttaaatacttcacatgtttcttttcaatacccttatccgttatgtttgctcgcaacatagtttgataaatatgttggacctcatcatttgttagttgcacctcagtatatgattcaatacatttttgtagatcgttataatatagtacatgtttatctttagaatgaacatgtactctttttagactgcattttggatggaacgctgcaatagagatacatggcagctgttgttccatcacccattcaatggcttttatatgtttatagttttggcgaaatggattttgaaaagaggctttctttctaaaaataccttgtgtccaccttgcagatttctcatttccatagatccatccttcatagttctttgtctctacaacaaatacaccggtttccgcgataacaatatgatcaatttgcgttgtatcaccatactccgtataaaccgtcacattatgtaacacaaagtaactttttggatctaatttacttagtatacgttttaccagtttctctccagcttttcctttccattttggtacatgttttttcacaacactattcaacggtattagaaccgcaataagaatcaattcaaatatcaatactttcataatagagtcctcctttttacacccttgcgtttctgcgcattaaacgatatacatgcgtttctaatcctaaaataaaatatgagatacataagccttttatcaccatctctacgaatcctaatgctaatgaaacaaggagcccacctcgaaactgaaaaggtctggttactcttctattaactggtttttcaatgacgccaaagttggcccaggtaggcaaacgtttttccacatttttcacggtacccattaatccgtattttaacgatagaatgaaacatccaattaataaataaacaacagaagaaaaatggatagataggcctattacgatgcctgtcagtaaccagcctattaatatagaatttcgcaaagcaatatattctcgatttctattcaatacaaacagtcctttcaaaattaataaggttatttttatttggaaaatatttacatttgtttataagcatgatatgatacgtctatattaatttacgaactagcctaaaaaggattgtgatagacatgttaaaacttgtagtagataataccgtaacagaacaagaaacagattcagctttttcaaactttttcacttgcaaagactgtgtatactatctttcaaaatcagattcttgcagtctacaattagcagctgattcaaataatccccttatcccttatgagtgtgggaattttgaggaaacctatgaaatcggaacggaagatccattaaattcacacatacatcagcaacttcgtgaagaaaaagcgcaaatactagctgaaagttatccagcacaaccttctattgatccaattcacaaagacgcaatatggtatggatcagtaaactatggttgttggattataaatgattcgaagaaacgttttgcacttgcagaacaggtacctttcggtgataataatatgtcatctaaaaaatacgcatctccttttcctttacatgaccatagtgcaaaagaaggtatccgacactatatgtgttggtacgtaaatgaaaaagggattggcgaataccatcttcttattggtggtgtcatcatgaaaattgcagaaggagttaagaaacttggattcaattactaatcgtatctacaagaaaagaatgttagaacataccatactatttagtttggtacagctggtaccactgatcgtatctaccggtatcatatatatattgctagaacttactgatacggagtggaaaacctggtttagttatgaaggaatctttgtaattatttttcttataacgaggttccaggtgtttcagaataagaaaagtattatttctttaaatcaacatgaaaaatggttttcaaagttaaatattttcttgatctctatatttctagtattatttgcatccataccaactctattaaagattgctttcattctacaaatgactgttattctatttctactagaatacctttgtttgtatattaatcgtttaccaacacataatttatatagagtaaaagagatcatttgtgataaaaagcaactcaaaattgaacgaattattccaaacaatgaggaacacggtactcatacaataaaaacaaatgatggccaatactttttatataccgctgtgtatttaagtggcatactatcgccaatatcagaagaagtatttgaagaatatgaaagaaagaacctaatgggtagataaaaggtactgaatgtagattcagtaccttttctatttttatatatagttctttacatattagcaaatagccatggagcgagtacggctaacatacacagcaaacaagatcccgttatgacacggttggcccaacggtaatattccggctgttttgtactctcatgaattcttcttaaacgaatacctgcgattaacataaatggtgtgaaaataagtgctgttgctttaaacaggtctaaaaaatccgtaaagatgttcataaacgaaaatacatcggaactaaataagaagtatacacttagtctcatcgacatcatgctgataaatgagaaaatcatacttccggttgcccacttcatccattgaccattctttgtaattaatgccataaccatgacaataactcctaatacgaatgaaatagaaaagatattgactcctactttaaaagccggcgcatacaatccttcaatcttttgaatgattgatgatccaaatgaatcttctttctctgttgttttcattcgattgtttagtccatctttaaatgatgacgaaacatcatttccttttaactcattaaaatctacttttacagaagcttgagctgcttctaagggtacaagtaataaaatcatcaaaacaagcgtgcataagactcctatcattcctttttctcgtttcatcacacatcacccgctaattttggtttgatgctctttaatttaatttcatttccttctgcagcataataaagatctgctgcataatagatatttgcttttgtatatgcccccataattgcatttgcaatttcttctttttctactgccacatatgtttcattttcattgtaaaactcaatttcaattcggttaatattattatttaacactgtaatatgtagttcttttaagctatctaagcgattccctaatccacataccaacttaaatactttatttgcaattgttggtggttttacatacgtcgtattaaaatgaatcgtttcatcatctatcacaccatcttcctcgacttcacacgtcataatgaaagaatgattttgtttttcaatttcttgttgactcaacttgcgatcaatgacatacttcacgcttgttgacagattttctatatattcatccagttcggtatttgaaattttaacctctgagaattccggaaaaatcatgtaagcgtgtatattagaactacttttacttacacgtaatacctggacttgtttcttttcatagcgcaccgtttgttctaatttttctactacattgttacttatggaattaatattcatttacattcacctttcaaaattgttatttttttaactcaaaaatattttttacttcatataatcctcatgtttggatttaatctattttaagcattgtaatattacgaagagttctcaattctcctgttttaagactgttaatcacttgaatctcaaaacatttcaatattacaatgacgtacaatgtatcattatagtcgaatatccttatatggtgaatcattctgtcccactcatttgtacaaaaataaaaaaatgttttattcttgtacaaatgagtgagaaaatgctgtatttgatgctatttaactaagaaaatacaactaggaaatagatttatatattccctagttgtctattactccattcaactagtgtataagaataaggtgaattgacctctaatttcatatacagtaattgatttttcggtaatatttctccctctgtatgaatccaataacgcttcttattagacatatttatgacacgtgtcagtccttgttcttgttctattacttttgcagtccacctcacaaaatccatatcttcaacatcagctactccttgttgaacagaaaaaacgtgttctgtttccggtggaattgaaacatattcttgttgtggatacatgtcctcatattctaataattccactggtatatcctcatcacttggaaaaggaatatcatatacagcctcaggagtgggagtatgatgaaaatcttcagcatactccacttcttctatatcctcatgttttaatctatcactctcttcctcacccagattcttatgaacagatgtagcaactaaatcatatatacttgctacatctttttctaaggtgatctcttttgttggaacagtaacacgctcttgttcccttccaataggtttattttctcttgggcaccaataaacggggcgttccaccggtttattttccatttcttttttcttggcttcttccattagaaattttttctttgaattacgaactaccaaaaacacataacaaaatagaccaataaatatttttgtaaacataatattcccctctcgattatccaaataaatcgaactcaaactgtccatcaattactttgttttttcgttttcctttctttttagaagaatccacttcaacaataactgaatcccagaatgtgatatcttgtttttgtacaagcatacgcttatcagtattcagtgttgttaaagctcgaatgacatcttctatttctccagctatttcaagtacattcttcttcactcgaactccaggtacttgttcttttttaatacattcaacagccctttgtacaaattgaacttctttcataaatgcaacatccatagttcctggtaattttcccacccagttcgtaaattgaatttcaattgattcaaacacaggtgtaatcacattaccgatatttgcaagaacccgcttcgattcatcagatgctgcttttgtccattcctctgttgaaccctttaattgatttccactctttatgttttgaattaatagagtctgtagatctccagtatcaccaagcattgcattcagaccatcacttgtaacctcaccgttcattgcttcagcagctttattcttttgagcaattaattgcgccatctgctgttggaacgtttctcggtatccaagatagaaggtcctacattgcttagtttggccaatacgacagtgtcttcttgctgcctgattcaacgcgaataagctaaatggtaattgataaaatatcaatgtaggtgttgcaagtaaatcaagacccaccttcactaattctagcgagcaaataattacattcacaccgctattcacttgatcttttagccattcactacgttttggcggagtaactgtattggtacggagaatagctactttcgcaccagatatttgctctacaaccttctgtaaacgtggttgaacgtctcgttcttttactgtagatcctgtatcacatacgtatacgatggttggacggccctcagaaatttctgtacgcaatatactttgcaactctctctctttaggctgtatacaatcctcatcaaatttgaatttatcattagaccaaaccagttcttttcctgcatcatctaagtaatagttcggataatggatcatattgtctggatatgcattacctgtacgaatataagaaagccacagtttcccagcgtctggtgtacctttcgctgcttcaattgctttttcaaacgactctttcatatgctcataggcttgcttctgctcttcagacatatcaacaagaattgtagggacgttgactagttccacaggatttggccatacatctttaagacgtacattaatggttgtatccattaagaattgagtaaacacataaggtgaaataccaggtacaaccttagttttatctaatgtaccttgtgctccgcgtgaagctatattagatgtgacctcaccatcatggtaatatgttctctcgatgtttccgtaggtttcattccattccatgaaagaactgtattcaaaaccacttttaaccattttttgagggaataaacgccataacgtatagaatacatcgcttgcgcggccaccaaataatgtacctgttccagctacaactttcttacaaacctttgctaaacttcctaaagcagttccttgtgcagattcacttttcagctcatgtatctcatcagcaataagaacgtcaaagaaatgcttcatttttctacgaatatactcaacagcagctacttttctatacgctcttcctgaatgttttgcgtcatatggttttacacgattctctaactctagttgtttttgtaaaggtttatttccctctttaattgcctgcactaattgttcctcatattttgtccactctttaaaacttgcatattttgtttttacttttgggctccaaatatttgaattacaatcagcacatacactatttttattcgttttagtatctaagtcactagctgtaaaatctttatattgacatacttctttttgttcaccattggcctgttgaaccatgatagaagatgtttttttacgtaacttagcaccacaatccgaacagtagtagccattcttataatatctttgcacctcttcctcagattttttagaaagaggagtctgcttataagataatggcatcattttgatagaatctcctcgcattgttgtaaaactaataacaaagaaggttggtttttgtggttttggtctcccggcctgaatccaagcttgatgaatacgaataagatcctcagttcgtttaataaggtgtatctctgcgtctggtaataagtgtcgtatttcttcttttgcccacttctcagtaagagttggtggaacaaatacgcatgtacgatatccttttttcccttttaaatgaaaatagccatctactgcagctgtcatcattgcgctttatgtgtggcatctcaatccgtaaggattgaggtagccactacccatttcgggtgcgataggtaagactttgaagtaatctccaccttttcccccgccccacaccgtacgtgcgattttcaccgcatacggcgttccatcgggaaaccatatttcaaactgttgtctcagttctccataaagactgttatagcattacgactataaccgccattacactaatttgttcaaatacgaataagagttaatttatcctcgaaagccgtacttacttaacctctttaagcaactttctaagttgctctattttctttccaccttttgtattggtaacgggattttcgttgtgaaccagcttgtggcatgttttgcacaaggaaaccagatttatcaccttattgactttattaagcggtagtttagggtttttatgatgtgtgttaagattccattcatttagctgaaccttacaacagttacattttcccctatctctgttaaatgcgtattctctattcagatagaattcaaagttatatatcggataacggttgttgagttggtagaaaggaatctcttcttggaagaaattcggtctttctagtgcctcacgtttgccggttgtccgtttataaatacttcggccattatctgtatagggcgacattaagagattcactttcatcgcattacgttttggcgtaaatgcaaatttggtgattcctactttagctccatgttcttcaatgaagaatactttacttttttgctctttgtgtctatctcttctatttaagagagtatccgctggagtggttagttgataatatcgtccacgtcgattgttcataaacaaccatgttctccattgggcgtaatgaatacgtttgtcaaacccttgaaatatagtagatacattggcgattttataataatttgctatgccaacaatctttgagttgatactctcgattatggcaacctgtttggatttattaccacgatggtcataaagggttttaatatttttattaatctcctttattttcaacttggctttatccatgttagggatagcttttccttgtatgttgccttttctaagccgatgttcttctgcaaaaatccagaatcctaagaaattgactctattcgttctcacatcagtgattaaggtcttctctttggacagctccagtttcaattggtggttaaaatatttctccacttttttgagaatccgcttggcatttccctcgcttttacaaaggataacccagtcatctgcgtatcgaattagaaatgtatcttcatgtctttgtcggacacgttgtagtccatttctagaaacgtctttgaccttgtatctagctggatgctcttggaacattctagcaatctcccaatcaaaataattaagataaatgttagccaaaagaggtgagatgataccgccttgtggtgaaccactaacgttatctctgacctttccttcttccataattcctgcttttagcattttcttaatcatcataagcactcttttgtctcggattcctattttccacattatttcaatcaacttattgtgattgatgttatcgaaataccctttaatatcgccttcaattacccaataggttttgcttctcctgatacgttcaagtgtttcagcaatagcttgctcagctgaacgcattggtctgaaaccaaagctataatgataaaatttagcttcggctatgggttcaatgacaattttggctatttcttgtatgatgcggtctatcatgttaggaatacccaaaggacgttgcttaccatttgattttggaatgtactttcttcttactggactaggttgatagttattaatgttcctacgaattagagacatcaacttatctctgcccatttgaagatagtagtccatagtcttaccatcagtgccagcagttttgcttcctttattacccttgatattatgaatggcggtcagtatagtctgctcgttcttcataagttcaattaggttatagaaaggtttactactttctttggctattcggtacatgctatcgagtgctagttttagctctttttcgttttgtggaaattgtttattatccttcatttttatatggatcgcccccttgattagagaaatggactatccgaaatgaattaactcttttactctcacatggttcgtttgaacatttcctcaattagtgcaatacttctcgactaacacccttccctagaatagtttctctcctctcctacacttcgttgcagaagcaacttatagcaagatacaaacggctattcatcataggtactatggtgtcgctgacttccaataagtttcataggctccaatacctccgcttattggctctcgcacgttccctttaaaccagcccttcttttacattccttagatgccctctatactccgacgctacttgttcatgagtagactattcctaactctcatgaatcttatataaactctggaaagacctatataagcaatttctcctcaggcaagagagaaatatcttcacgcaagacccaatcatatatctcgttattagattggggaatgagtaacggagcgtacatacgagggttcgatttcgctcatcatagaatgtttttaaagcctaccgccctaaatccacgtttaacgagttcgcttcaaggacggcttcacctagcttcagacccctatcacattggaatgataggcgcatgtaggagtctcatagacatgacttgaattggaatattagtcatgacagggaattttcaccctgtaaatcgtttaaagagttgtaaccaatcttaataagatttggcccccgcttttcgtgtttaagctacacttatagcggaacgtgccgcactgcccgtgctcatttccccctgcaagatgattcccttttgtacttgtaaagcttttgctacacctgttgctacatgtgcttgtacagggaataatggtctttgatatgtatcaaaatgagataatgcctgatctttcatcggttgatgtaagggctcatccaattttgtaaccttatcaagcatgtcaggtgaatattccaataggtattcatttaaatcattaatttcattgattttttcacctgtaccttcttgcggaaattgacatttcccagagcgtatcatttctgataaaaactctttacaatccgtttcttttagtaagacttgcgcaatcgttagagaagaaaactcattcttatcaaaatacacctctaacggttgtaatagatctcttgttagcatctcctcataaattggcctcgcccattcttctaagatcggtaaaccatacggaggagccattaggaaatcccttacttgtttctctggcgcttcgtcaattgcaacaatatacttttcttctaattctctagaaaatgcaataattgccttcttcttatttgctgtttgtgtgttaataaattcaaactgaccttttgagtttacattcacttttttatctaaaatgtaatgtaattcttctttttttccctctccaaaatacaaacgattagttcccattgatatggcagcacggaatgactttaatgtactgtcattcgcacctagtactgcaaattggatttgttgatgacgatttactgccattgcaaaacaaaaagctgtatgtgaggcaacggctgtctccaattgcaacattgctggtgtttgttcctggtcaaatgtatcttgttgaattatttcttgtatcataagtttccctcctaaaataaaaaacgcatcttattcgatacgtctcatgtcctactcattcaatttattggctaaaaatctataaactgtttccactctggtaatgattgttcagccgcatgtagcatattacctgcaccttggaacgctgagaattgctctaatacttccaaatatgtacctgcacctaattgagaagcacataaacaaatgactgtaagtacaatagcaatacgaaacatacgattactaaattcccatacgataaataatgctcctattcctaatagtacagacatagccttcttcctttcctagacaagttctttgacttcaccggtcggtgttgcgatgataaatttcgcgcggcgtttttgtaaaacaacttctttcgttgttttttgaagtggctcaaatgaagtttcataatacacattctcagatccacggaccgcatggagtgtatctccttcacccagtaagccgtctgccacacctgttatcagcaatagtcctaattgtccggaagcaatcggcattttcgctctttcagcagctgttttctcaccttgaagtgagtaaccattccctctatttaaacgctttttgaacgacgagataccttccgatttcccaactccttcataagcacttttataatccactcgtgatgtaaaaataagtttgttttgatgacgcaattctggtatagcccagtccttacgatttaccatttctgctaatgtatttacatgttttttgacgaaagaaaggtcagacatattttcgcaaaaattagcaaatcgatcattgaaatatgtatcattcttcgtagctgcacgcttacggccaataaaaacacattgcttaaattgctcaaattcttcattttcatcgccaaaacgcattaatcctatttcctcataatgttttgctataaaatagctaatatcgtccctagcaaatttgtcgtatggaatgacatacaccataatcccaccatcttgtaaataaaggtgagcacgctttaggaagttgaactccattttctctgattttgtattttctgtacgaagctccgtattataaggaggatttaaaaaaataagcggaaagtagtcatgactaatcatcatactttcaaagtccgaacataccacttcatctaattgctcttttgcttttccatatcgatttgcatctacttccacaccatatgtatcaatttgtatgctaacctgtctcacctcatctgcaaaacttcgtaaaattgtaccttctccacaacatggatcaaagcaagcataaactcgctctggttccatttgtaataactgtattaagtgtttcccttctaatagtggtgttggataatatcccgccgctaaatcgttacctatgcgcattatatatttccctccaaagttctttttgcaataaaaaaaggaagatccaagtatatacatcacttagttcttccttttaccctctataaactacctcgacttgcttaaaatggtagttcatcatctgtaatctccgatagctcttccataccagcaaaaatatcatccggctcttgggattgctcttttgtttcctgctcttttggatcatctaatactgtccaaatcttatcttttttcatatctatatccctctatccttcttacttttctgtttcataaataagttcttcgtagtcaaaaagataatctttcaacttacgcatgattttacgaaactttggttcggctacgatcttagtaccactataaaaactttgttgcccaacaaagcgccataagataacatagcctatgttcatttcctgtatcccttcaataaataatgcgatttcttgaatggcttctttttcattcatagcatgtggtttaaagtattgaaatttaccaactggtaatataatttcagcctcgaaacaacctcgcatttgatttaatcttcctcttgtttcagatgacattgtagatgtagcatatgacttctgttgatatgtctcatttgcctctattcgtgttttatgctcctctactgttggtactagtcgtaagtgtctacaatcttttttcattttgttttatctcccctaactgtttaatttgctatattttgatacatggccccgcctgcgaacttgaaaacaacacaaaaagagcttcttcaagtcgattaataatgtgtatagcaaaataagctatatatacactaatcggctcaaagaagccctttcaaaattgaaacaagacgcaacttgcttctacaactcaaccacaacacaataaggtgtgggaataaacggaatcaattaaactaacaatatacctatatattatataatatcgttatatatttcaagaaattttaattaaagttaacgcattaccaaaagactccttctttctcaagattgtgaagaacgttaatcaaaaggtatttaatgcgttagacttaataaaatactatcaagtgtcttaccactttcaatccaaacacctactagaggtgtgacggcccatacaattcctttagacgtttagcactagcaatttcaattcacgtaactataagaggtgcgacactaactttttgggttggaaggctggctttaaaaatttcaatccgcgcacctgcaagagatgtgactttcctttaataaattgatagagtatctccttataagaagatactctatcaactattctgacgctttttattacatcccattaataatctcaactattaaatcatctaattcatgtaccagtacagtataatcatcgattgtttttggctcgtcaatattccgtttaacctctaataaacgatgtatttttgcagaggagtattgaccaagttttgaactatatgatcccaccaacaaactctatgtacttctataattccttcagggcgtgctgctgatgcatcattttcaatcaatggaaccagtgcatttttcatcatctccgcatcttcgttagtaaaacctgtcttttctgctaactgtgtattaatacttccataaaaaaacatagactccaaaatcaacacgatgctttatccccgttgtatctgaacctttatccttcccaagctcagaatttacacttttcttaatctgcatacaagtaatatcaatcggatcaacacttgttgctgtatgaattgaaacaggttctcttactccaacagagacactaaattactatcaattatcttatcagccttactccacacacctacaagaggtgcgatattctttgtgtgttactgttgtatacgacttaaaatttcaatccatgcacctatataaggtgcgacagaggagcataaaacacgaatggaaaataaccaatttcaatccacgcacctatttaaggtgcgacatccctgcttctatcattctcggtcaaatggtctttatttcaatccacgcacctgcaagagatgcgactttcctttaataaattgatagagtatatctttataaggatactttcgttcaactattctgacgctttttattacattccatcaataatctcaacttttaaaccatctaattcatgtaccaatacagtataatcatcaattgtttttggttcgtcaatattccgtttaacctctaataaacggtgtacttttgcagaggagtattgaccaagttttgaattatgatcccaccaacaaactttatgcacttctatacttccttcagggcgtgctgctgatgcatcattttcaaacaatgtaaccagtgcatttttaatcttctccgcatcttcgttagtaaaacctgtcttttttgctaactatgtattaatacttccataaaagacatatactccaaaatcagcacgatacttcatactcatcgtatcagcacctttatccttaccaagatcagaatttacacttttcgtaatctgcatactagtaatatcaatcggatcaacactagttgccgtatgaattgaagtaggtccccttactccaacaaaaacactaaattactatcaattatcttatcagtcttactccatacacctacaagagatgcgacgaaagtaatctagataaggcagcaagtaatttaatttcaatccatgcacctatataaggtgcgacttgtttttcacaaagcattaataccagctacatatttcaatccacgcacccatataaggtgcgacttcttttgatccgtaagaacgttccatttccatatttcaatctacacacctatataaggtgcgacgtcccttccatcggcggcagctcatattcaattatatttcaatccacgcacctatataaggtgcgactcgattccacttgttcaggctctttgaatatcatatttcaatccacgcacctactagaggtgcgacatccatttgttgttacttatgaactaccgccaatgatttcaatccacgtacctacaagaggtacgacttttctttaataaatggttgattaactttttaataaatacgctttccttcaattattctaacgttttcttcattacagtccatcaataatagccacttttaaaatatctaattcttttaccaaaatgttatagtcatcaattatttttggttcgtcaatgttccgcttaatatccagtaaacggtgtacttttgcggaagagtactggccaagttttgaattatgtttccaccaacaaactttatgtacttctatacttccttcagggcgtgctgctgacccatcatttccaaacaatgtaaccagttcatttttaatcttttccgcatcacctttggtaaaatctgtcttccttgctcattgcatatgaatacttccataaaatatataagctccaagatcaacaccatgcttcatccccatcgtatctgaacctttatctttcccaggctcagacattacacttttcgtaatctgcatactagtaatgtcaatcggattaacactagttgtcgtatgaattgaagtagatcctcttactccaacagagacactaaattactatcaattatcttaccagtcttaatctacgcacctatataaggtgcgacttcgattgaacaaaaattgattcttccatatcctatttcaatccacgcacctacatgaggtgcgacgataccgtttgaatcgatgtttctcatagtgtcatttcaatccacgcacctgcaagagatgcgactttcatttaataaattgatagagtatatctttataagaatactttctttcaactattctgacgctttttattacattccattaataatctcaacttttaaatcatctaattcatgtaccaatacagtataatcatcgattgtttttggctcgtcaatattccgtttaacctctaataaacgatgtacttttgcagatgagtattgaccaagttttgaattatgatcccaccaacaaactttatgtacttctatacttccttcagggcgtgctgctgatgcatcattttcaaacaatgtaaccagtgcatttttaatcttctccgcatcttcgttagtaaaacctgtcttttctgctaattgcgtattaatacttccataaaaaacatagactccaaaatcaacacgatgcttcatccccatcgtatctgaacctttatctttcccgggctcagaatttacacttttcgtaatctgcatactagtaatatcaatcggatcaacactcgttgccgtatgaattgaaacaggtcctcttactccaacagagacaccttttccagctccccctttaaaggcaaaaacttgtccaaagcttcttacatcaatccactctttacatgcaattgcagcaaattgttcatgtggattatccttcgattttaacgctttgactaaatctacattggtttctgctcgttcccttaaactattaaattggtctaccttcctgtcatttgattgaacaaaaatagattcttccatgtcttgcagacgatttctaatctttcgtttaatggctacatcagagatttcaccatgtccatcataattttgtcttgggcgatttccattcaaaggatctccatttggattagcttttgtaactgatagaacaactgcaaaatcgattttgtgatctaaagttttcatttttaattctcctctccaatatttactacatcatttagtgaaacatttttttcttttttttgatacaattcatgccgttgactataaaagcctaacaagtattttccagacagtggtttattattaaaatcttcaatttttatcattgagccaatctcatcaattaatttgttataataccaaactttctcccctaaacgtgcttgatacggttgtagggccccttgaatggtcctccatgttctttccggatgttgtgaaaaggaattcatatatctcctagcatttgtagcacgttggtcaccattatttaatgcctttctttccaaaacatccgcaaccgctagaaggcgtccgaagagataatctctattattattttccttatctaataccaattgatatccctccattttattaattaatgcacatgtaatacttaatgttttttcccattcccatttttccattgatagagggtttgatgcacgctgaaaggcacttctaacaatgtcgaaagggatttttctctcatctatgatgcaaggaagcatacgctccatcaaactcttgactactttttcgtttgcttttggcccataagcagcaaatgcaatatctctggttgacggtgtcccataaaatttaacaaattcattatctgcatttttacggtaaccatgctcccagacacatgtagaatgccagttcttcaacctatttaaataaaggtttttatccatattacgatagtaaagaaccgctaatctacctgttgtcgctgaatcaagcaagagaatatttacattttcactggaagataaattatttttataaccatcaattgccttagcaacttcattggcaaattgttcatgtgtataggattttatttctcgctttttagttcctcttatatccatagaaaatatactgtaactatcctctacaatatctggaacatcttctgcatcattgccccatacaagaaatacacgttgatcgataatttttccttgcttgttaataagccatttcaatgcattatgtgctttttgggacacatcatagctaatattcgctacttcatttgacgtagtaaatcttcctctaaatgtgaaacctcttaaatcatttgaagagattaactttgcttgatcactggcatttctaatctttttcgcatgtttatcagtactcggttttatttcccctgtaacatagcagtaatcttcattatctaggaggccatcatagaaattaataaaggagttatgtatttctttgtcttgccatacctttgatagcatcttatttggagaatacacggtaaatctaacaaacgcggcttcttggccagctggaagcactgtaaagatttcgggcttgttccccagaaaaacttcaacttttttatcccattttccaatcagcttttggttttcatcaagccataatattttggtttctaccaagtctttcactaattgtttttttcttaagtatttgtaaatgctttttaatttatctgtagaatatggggattctacccaattccttaggtgttcgatataatagccaaatgactcctcttcttttttactgccgccgtattcaccaaaatcacctgcaacgtaagttaatttatcatgtaatggatgaggaactttatacgctccggtaccagacctacttgcagagtcttctgtacaagggatcaatgtattggcgtcgctcttatctatgactgttgctgaatggaactccccttcttctgtaattaaaacttcaatatttgctgactgagtagtgtgggaaataggtagcaatgtatattcttggccattatattttttttcaattttaccgactcgatctaaatttgattgataggtctcatacaaattcaatagccaactcatttattcacctccttcttctaattgttttataagctcatcaactgattcaacgtttgaactgtcaaaaatctttggatccatcttggatattttacggatttttgtacattcttctggtcggatgaattgaataattccatctctcattaccggattccataatcgaacttctaattcattcctacctgtttcatcaggataattaagcccatgaaccattgtgcctaaatgaatatctccaccataattatcgtaaaagccttctccttcgccaaaaacacaaggctccacatatccttggcattctctcgttcctaaaaaaatgtctcgccgtcctccaactttaagtgaacgttttaggatgttatgatgcttatattcattacgatcaaaagctaaatcaggtcgatgatgattaaagataaaatgagcctgaacttggtatcttacattctttaaatatgtgtaatttgcgagtgtatttccaccaccatattcaattggacgaataccttttgattccattttgattgcattcataattcttattttatctacaatcataagaagagttggcttccagtagattgattcaacaatccctttgatagcttgataagttggtacttggtaagttaacttttctcctcccattttcatcaaaggatctgtgaaaagtgcgtaatcaccaaaaacctcaaattcaatagaattccgcaaagattcttcctcctttttcattttcattttctatatttttctagtaaattaatgatactcctcctatgtaactatatcaatatttggcgattatatattatatgaaatttaagaattcttttgatgtggtataaaaacatcgattaaaaaccctatctcaaacaaagatagagtttaaaatatagctgtcttaaaatcgctctcattaagcactttccttcaaggctagaattttcccatcaagatagtatacgagtccatcatttattatcaatttttctttttcatagttgaatacgttaactgtatactgctgtgcctttcgtaataatcgagtcagatcctcaatggaattattgctatttaattctgcgataatatcctttccttcttcatatgggacaataactgaagtggttatatcatcaatgacgttaaaatgtttggccgctgtctggtagctatttataataaataatggaatatcttttttatcatgtttatgaatatatgctcgacgatagctattttctattcttggtacggataataactcagtcatgttcttttttagttttggaataaagtaatctaaatctgattcaaattctctataatattctttaaaatacctcttcattgcctctcttgataaaatatgtcctccatgtattttatcgttatgttttaaatccataaggattttcttcgtaattttctttccaattttaatttcctttaaatgacttaagttttcctcttcataatcaatcacatagacattctgtatgcccttttccccgtggcgattacatcttcctgcagcttgtgctatataatctaaccctgataaagaacgaacaacacactcaaaactcacatctacacctgcttcgattaactgtgtgctgatgcaaatgatttttcttccttctttgagacattctctaacttcttctaaaattttatgtcgatgtgctgcacacattgttgtgcttaaatgataaatagggatatttaatccttgactctgtaattgtgtatataaatctctcacaactgattttgtatttagaacaatgaggatactttgtacttcctctatttttgtatgtataaatgttttgagtttatctttattaaagatttcattagttgcttgatcaatgattttcacccttttaaatgcttcaattacatgatcaaggttattaatcatttcagcatccgtatttatgtctaatttttgttctacaaagtccaaagcaggttgagtagcagtgcagaggactatactggaacgagtatatatttttaaaaaattcaatgcttgattaaataatgaaacacatgaaacaggaactttttgcacttcatcaaaaataataattgcctcacttaaattatggagtcttctagtatttctatttccctttgcgtaaaacacatttagaaactgaaccatggttgtaaaaataataggagaatcccaattatctttagctaattttaatttttgttgtatgctaaccacaccgtcttcattttcatcatgctcattcacttcttcaactatatttgaatgatgttctaaaatattttcttcatcctctaatattcttcgaacctcttccgcattttgctcgataattgttgtaaaaggtacaacataaataattcgttttttattatgggtgtttgcatgttttagtgcataccttaagcttgctaatgttttaccaccaccagttggaatagataacgtatatattcctgatggcctctcagcgaactgatcacactgatctgacatgtctgctctcaacatgttaataggggtatttgcattctgctgttttttgaaagaattgatttttgtcatgagtctctcgtagtatttctcaaataactcatcaacatttattacggattctacacttttttcttcttcaaataatcgggtgtttgttctatcggcatcaattaatgtactaaagatgaatttagttaaaaacattaattgtttttcagcattttctggggattctttaagtaggaaactttctagttctacagtagctttgtccacatactcatgaaaatctttctctttcatgacatgtttaaaaaagaattgttgtgtaacatcaaatcctcttaattgcttatctcgcactctatttaaatagggcgattctaaatctggatttaaaaaatcttgaaggtatccgtggtgagaaataatagcatttcccactatctcagatattatccctttgtaaggaatcatattttctgtatggaataattgatataacaatttcccccctgcagttgaatggtcaacactcccctttttaggtggagaattaggattatttactgcttccaatatatattctttaaactcattggtgtatttccccatatcatggagcataccggctaaaccagctaaatgttttataccaattttttctccataggtttcagctagttcttttactcttaataaatgctcttcgactgtttgtacttgactgtcactctcgcgtatatgagcaatgtaggtcattcaatctccctccattttatactgtttacttttgtattagatactgcagatatagatacttctagttgagtatctactaaactatttcaatccaagcacctatatgaggtgcaatcatgactgaattttgtcaaaattgtgatattatatttcaatccacacacctatttaaggtgcgactatgagcgttccagataaatataaacccgaggtaatttcaatccatgcacctatatgaggtgcgactgaaaacggaaaaacaattgagctagttgcaaaatttcaatccacgcacctatatagggtgcgactatgggcattccagataaatataaacccgaggtaatttcaatcctcacacctatataaggtgcgactggtctaacatctaaagccattaataactcctaatttcaatccacgcacctatataaagtgcgactgcaaagacgatcataacgactggagcaacaaaatttcaattcacacacctatttaaggtgcgacatacactttttttgatttcttctactatcttcatttcaattcacgcacctatatgaggtgcgactttaaaacgtgcataacctaacactttcccattgtatttcaatccacgcacctatatgaggtgcgacttttttactcggatactctaaaggtgtaacaataatttcaatccacgcacctatatgaggtgcgacatgtgggtgacgtcattaaattctcgtatcttgtatttcaatccacgcacctatatgaggtgcgacaccgatttgtgctcaaaatcaatcacaaatacgttaattctattcaaaaatataaaaatatttttatttattaaagtattttgtataaaaatcataaatccccatcatacattatgagaattctaggtgcgaatgtactaggaatttcatgtttgctatacattcgcacctaaaaaatcaaaggactttctaaatcaattcattcttgtacaccgatatatttaattttattttcatagctattagctaactaataaacaagaatgtatagttttataatatgatgaagaattttatttattaaatcttctaatcacatcgttctacttcttccttgctaattcagcaccttcacgcttcatttgttttaatacatcaacgtacacatgaatcgcagtagcaacctcattctcaacatctgtagaatgtttcgtgtaaaatgttcttattccttgtttattaatccctggatataaattctctgtttctccattttcaattactgcataaataccctcttgccgagaaattactaattttctataatctttccagactgaatcaggcttttcgctaaaaccccaattaataattatgtggaagttacaattccctatatcatatccaaaaattttcttagtatgggtttttatgcttgcagtatctttccctttcaatattagagcttcacccattagtaagtctttattttgatgagaacgaattactatatccctttctcctattccccctctatctcccatctctttccgtgtgtatccacctctactctgagtatgagtaatccaaccaaaggtatctactaaattagaatccatatgtgatttaaataaatccgtatatctatcctcttcagcagctttattctgagatggcgtaacaattggtgataaattctcgattgtctttaaattatcaaatattttccctaccaggaaaccccacacactttcttcttcatttcccgtaaacagtttgacttgttcttctggtcttagcgtttttagtttgttaatactactagctctcaactctatattctgtcttaatgaactaatttgctctctatactcacttattttcccatcattatgctttctacctataattatccctttggtcgttgcaatatttgtattttcaggatttaattcttgagcacggtcaatatatttttcagctagcattagattctctttctctaagtaactcaatgccattaattcatatatagtagcgcatgcaaaaaaaccaccgaaacctatatagttcttttcaccggatctttgctcataaagcatttctaccaaggtatcccaactatattgagattctaaaaatttttccgctgattttattacttcattatgctgattcaacttagaatatactactgctaatccaagatatgaatactgtggaaaataatcatttggtctatcatacgcgtctattttaaaatacttgattgcttgattaaaataatatgcactatttataagattattatctgcttgatatacctctcccagtatacgataagtctctgaattatccccatgtatttttatagaatttaataaacaatctattgcagcttgtaagttattggcatgaaaatacacctttcctagcagtaacaacactttactatcagtgtccttcccctccaaattttctaataaatctattgctttttcatattcttctaaaagatagtatccttccgccaaatcatatactccagttatatctagtgaattcatagactctaataatactatttttttcttattgaaaaatttatacgagtaagaatcaaccatatcattaaaaacatatttgccattgtagccataatttattatcgatccgtcccctgttaattcaaccctttgatttctcattaaccccttgcattttaggcaacattcgctaatgttataaatttccatttcatccttaactagctttactaaaccactccaactatctttaaagtttcttaattgaaagtcattacaacaatttctacaaatattatccccagctatattgcaatgaaaatcattgttgtttgtctcacaaaccctacatttacacaatttggttccctctctccaattaccttctacttatatattatctactctactttataaaaccaaaactttatattaatcttcactctaatctcaattaaaccttatttatttataaaataagcatacgaaaaagacctaaccattactttagttaagtcattttttaagaatatttttatttaaaaataaagcttgtagtaatttaactaattttaataagagcacttccgcagtttatactcaatttttattttcacgaacatgagcaatataggtcaccctatcttccccaaatacatagtttaaaacggaaccattcttattttcgaagtaagattcttctatttaaaatagataaaccaaaaaatgtcccatacaaaagtatagaacacttcaaaacttgcataatttaaaacgctaatttataatcatcatgtttttcaataaagtttataaattcctcattgttcatatctgccctagtatctactaaattgcatgatttctgagaataataaacatttctaccaattatcttactgtccctcataatttgtaataatgactttttctgttcactagttaatgttggattctttttcaaggaattcactagaatacaattatatgatacaggtcgcagtttttcacaatattcctcatgactagtaactctgacaagttccaataattcaccttttctcatatttgctttccaaacattgtagacaccttttatctcattactcaaaatagaaatcttatttactttatcttgtaacatcgcatgcgcataaagaaaaataaatcgttcgccagcatctttcaaggactgcgaataagctttttcaatatccttacatgattttgcctctcttagttcaccttgaatagcaatattacttattgaatttagggctatctctttatactgaaggaaggcttcctccttactaccataaccctctgcaaaaatctgataattatgctcaacagattcaagataaatgggaatatgtaattcactcattacctgataaaagttcaaatatttctcatcaacccactgttgtccaggtaaattcctaatagcctcttccattaccatttccggtactataaatactgttcctttgtaacatgtcattaactccttgaaggaactttgctcttctcttgccaactttgctaaatctgataggacattattatccaatatataatagtgtgtaaccctatcatttttcctaccatcttgtaaataaggttctattccattgcattttgaatcttggttcgtctctggtgtattggttacttggtccatttatttgttcctccttaaatttccattcgaatagcctccagttgtttgaaatgctgatttgctagattttgaatactttcaaaatctgattcaagcatattttcttgaacggattctgattcaagtaatttatttaatccatcaatcttaattgcttttgtaggttctaaaattgaaagatcaaaatcttgtggtaaattatggcggtaatcatgatcaataattctctctgcatcttccatactaatcaggttttcttgtgctaatttaattaccatagttttataaggcaattcaaaagctggaattaacctaattacattcttctccaaagaatcattaacgtaatttaattttatttcttgaaataaagtttttaatacatcatcatttattaacaactctgcagcaaaaagatttgctctacgctcattttcatttaggactggattattcacaaaagttacatcatccgcatttttgattcgatccttttcaaattcaaaatgatagtattcatgtgcccaaacaaaattctcatatgttttcggttgtaaagtatttatgtttatataaaaagagccatttcgatataacaccattcccccataagataaagatttgctcgggaaaagtagtacttctgttttctgcattaaataattacgtatactttctatagttttatatttaaaatgaattcccttttcaattgtactttctacgtttaccaatattgaaggaagtattttttgattctgctctataacttccctgatattagtgctatttatcattcttcttcacatccctttgtagataaaattcaacgttgtatactccaaaaatttataggctatatttaatgttaagtattagataaaaaatattatataaaatcatttctatttaaattattataaggctttaatagttcaatcattcttatgaaatcgtctaaagtatctaaagtatttttgaattctgtttcttcgccctcaacggctacataatttgcagctgcaaaatttcgtatatcagatctttttaatttatcttctaattttaatggtggtttaaattctgaattatagaaataaaaatcatcttttattccaaacaattcgtttattttttctattccttttgttaaatcgccctctccttttaatagcttataaaaagtcgcctttggaattccgcctttatccataacccattgatgagttcgtcctgtcgcctctaagtatatcctaatgttttcacccactatttttttcatttaattccctccttgttatccattataacactagtatctaaaaaagataccaaataagcgtaaaaaacttgataatatcagtttcatatttaaaaatgaataaatagtatctaatttgtatacaaatctatattaaccactccaaaattctataaattataatttacagaattttaaataccctattattttcttacataaaaaatattaatggataaatatcatataattttttagatatataatataaaaagactacgggaattttaaaaaaacttaagtatttgatatgagtgaagccgaatagagatacatgaaaaaacacctcgtatgggaatgagaaaatcttatctagaagaaattatctggaaaacaatcgagctgaaaaaacaaaggtacacaaacaaagaaattatggatcaattagaagttaaaaattaagcacagattaaaacttggatgaagtggcatcgtgaaggtgaaacgtattgttttagtcgccctgtaggaaaacaatattcttatagaaaagtgccaaaagaattaaatgaattggaacaaatacgcttagaaaataaacacttaaaaacaaaattacttatatacggaaattatctggaaattaaaaggagttgaaaccggaatttgttgttactttatggaactgtttaaacataaaaataactgtaaaagaattgtgtaacgtattagaattaccctgttccacatttatcggtggttataacgaacaaaatattttatagataaggtaaaaaagaaaatctaggacatctgtcttaggcataaattacgatatgaatatcgaagagtgactcctactcttcggctttgtgaatcataaaaagtattaagacttatgagacaaaattatattctttcaaaagtgtgccaaaaaaagaaatacatcaatggtgtggaaccagggatagaccctcatcgattggaatgtcaattcgattcatccatacaaaatgaaacatagtttacggatatgtctaatctattatttggtgagcgtaaccttttagttatcaacgattatggatacctttaatcgtgaaattattagttaagtcatcaagcaattataaacactggcattagcagtgaagacatcaaaacaagcaataagagggcaaaagtaaaaatgtccttctacaatcgaatcaaggaagtatttatacagcaagaagtttcaagcgtatgccaaagaaaacgacataattatcagtatattccggagaggaaattgccatgataatgcctttatagcaagctgctttggtcatttaaaaagtgaagttttctactcacaaaagataacaaaaaaccaaacaaaactgtgcgaaagatggtactagtatacatccattcctaaaattgtgtgcgaattcaagaaaaatcaaaccacctgtcccctaaagaatttaggtaacagattaattaggtgctttatatgttttagaaatatatcctatcaatttttttaatttatagttttgtacatgaatttattattttatgttatttttattatgttattctaatataacattaatatgtattcagttcgaataatttatcctcaaaataggtttaatatttcatagatttccgatggttatttttgaatttgaacagcgtaaaaattcaaaaggtcttgtatattaaattgttttttaagtgggtatggtaattgctatattttttacatcgatagtagaactggtgataatgttattaaaaggtataattattaatagtaaggagaattatatgtttgattttgaattggagttatttaatttttattcgaaaaagttaagtaaatggaatttagtttataagtatgttttaaaaaatattatttttttggttgctacttttatttcaatagccgctttagttattatttctttaaacatctttgtcgaacatgatattgaatttgattctttctatatttatatgattttcttttttgtttatatgattttgtttttggtatgtatgcattatgttgtagtaaaaccagctattttgatttctgttaataaatataatatctcgtttaaaagcaaacaatggcaagtttttatttgtttaattgttcaatcatatttatttaagaaagaacttttaaataatgatcctaaattcaatgaagagtcattacaatttttaatacaggtgttaaaggaaaaaaaagaagaaaccgagaaattaaatgtattaaaacttttgtctagctatggttctttatttttcttgtttacgattccagtatggtcagctttcaatagctgggtttataatcatgaaattaagacatcagcagaagctattcagtatctattaatgttaggttttttaatttttatgtctgtctttttaatttggatgccttttaaaaaaaattttttagaagaattgtttagtaaggaatcaagtaaaatatctgatttgataaaagcattggagaatattaatttttctttgaaaaatttttgtcatcttaaatcagaaaaatcaggggtaataaaacaaagtacaattgattctattattaaggaaaatactaattaaattaatttgtttatcaaatataaaatatatattcatttgtatttaaatatccatttatttacacaacaactaaccatatctttactcgaaacttttagttttaaacaggtagatcagaatctacttaaaaggtatgtaactcccatattctctcgcccaattgttgaataaaccttgcatttttttaacaactttataacaggtgtttgattctgttaagaaagaggtgaaaattatatttgacgaatttataaatgcattatgattttaataaagatactatttttaatccgtgtaactgtataatcaaaaaaagctattggaaacatacacttttcgtttgtttccaacagctttttttgatttatatttaaccataatttacagcagattaactacctcttgacgctcaatccatttatctaacttattatgtgtttcttcgcttaatctttttcttttgcctattaacaattttgaaagattagatggtgatatctctatttcttttgccatatctcttaaactacacttattttcttctttatattggagaatcttctgctgataccaattaatatccctatttacctgttgctgttctaattgagatgtttgaatttcttctatctccatatcctgtacttctattactggatcttttaccactgtttccatcaatttattcttaggagttatttttttcttttgtaaaagctcttgctgtaacgatactaactcatcagtaggtgtaaccgttactttaaggtttaaccaataattctcaagccagttacgcccagaacatttcccctcatcaatcggtgtttggtattgccattccttgatgacttcatcacgcattaagtcatcaagtgtcttttcgaatacacttcttattctggcaggattttgattcatgcttacacccataacacttataagaccttttggaccaccgattgaataagggtgtactaaatgctgataagcttgctgaattcgccatctccaacttaaatacctagtcaatcttttatgatatcgctgttgtttactgttgtattcaagggcctttttcgataacaaaccagtcaatttttctgatccatataaatacttagataaaaatgttccaggtgcaacattcatactttcaatacctaacatttcatcggtatcaatatctttagcaaatactatttcatccattacgaatagtcttcgtactcgttgctttttataagcaagtgactcatttggattctcatcatcatttagtataactatttcattatcttcgtttacatatataaaaatacttgccagtgcagctaaacgctccataatctttaaacggtcctctttacgataataggacttaccatttctcacctgcttcatactacacatttctaatatttcttcgtaacctatatgtactggactactttccgtgcttgctgacttcacccatatttctgttacaatatccaagcaatcagcagttaaatcatccattacacgatcaacaaaagtagaatcaactaatgtattccatctatttaactcccctgcgcctcttaatttcatatcaccatcattaaaacgtgaagataccacaacaaggctattactcttatctggtagctcagcaatatgggcattcaattccttatcttctgtaaaattattttttgcaattgtgtctgttaaatggtacataaaaccagcactactatgttcgatgaagctctgctgctcctctgtatgttttttttcttgtttttgtttcactaaaagaatttcaaattctttttctatatcattagcaagtaattcaaatacttctggtcggtatccttctatttgagcaacaatttccataataccaacaccttgggattccttatacgatatccaatttgcaaattttttaaaggagacagatgtgtacataggatcctctaaataactaacatcgctattaattaacgtacaaagtcctctccatttattaaagattcgttcgttattttctatattttgaaatagtgggtatgccactaataatgtactttgaaacaattgttttaactgatccatattctcctcctattcacctaatatggtgcgcatacttatttatgtactaattcttcttttgaattatctgctaataatttcaataaatttacacatcgctctttaatttcttttgaacgcattaaataaactataattttttttatttcttgtttctgttccggtgataattctgataccaacgaaggatgcattatgtgaatatgtatatatctcaaaaaattatcgctcatagcatatttttttatttcttgtattacattttccttctcataaatagatggaagggacttatctctgtattttgctataaacgagtatactatcccgtctataggtacataatcattattaaagttttcttcaaacctctttataaggcttctcattctgttaaccactagcgcattagaattatttaaagcatcacataaatacattaaatctaaaattaacatatttgcagtatctttgaaattaacattctcgtgcaaccttccatgcgctgctgtatttcttaactcaataaaatcatacttaaaatattcatgacatttgaaccgtctatctttttttactatctcttctatttttctatccaaagaggtacgttctatatttgctgaagaaacccctaactcaatacaataatcatatattatcccctcaatttgaagaggtataatctggcagaataattccatcatatcttctttataaatttctattgcttgtttaagcattcctctcttattaagtacatgattttcctctataagagataatattttattgtcaatttcatgtgtaattatatatctatccacacgttcattaaattcatctttattattactgtgtagaagtttcaattcatttcgctcttgtaacgtaataaattcaaatttataattcaatccatcaaaaactgacatttcatattcttcttccctacctctaaaagcatatcgactcggtaacatttgattaaaactaccggagctaggaaatccatttggtttactccaatcttttacttctttatatatacatgaattgatttctcctgtcatatattcacatatcacatctttcgccttataaagcttttcagctaagtattgatactttttcttttcatatctatcaatatctttaacttgctgttttgattcatattcttggatcataaaattaatttttcttaaatccttcattacaagaaaaacctcatggttaaaacattcataaggctctttatcctctttaattcccattatgttatgagctacaaatagatagatttcttcttcatctggtaactgttttaatttataaccatatttctcacaaattattttagtaacttcttctttgtttagattacatacatcgatttcaagaacattatttagaaagtgtcgtgcaagttgagtcttattcacactgaaaaatataccattgtctattagtttataattaacttcttctattctttgatccattctcaattccccttataaatgttttaaaaaaatttctcttaatattttctcctgtatatttaatcataccttgctaatttttcagattcaatttgtattgtttcttctttttcagaggaaacacttttcccaagttacgcgtataacgaaaaaagaggaaacacctgcaacaaaatacactactttttggaaacatattccttcttaaaacacaaaacaagaaacacttttcccaagtcgtgcgcgtaacttttttataaacatgccaaaaaaccttttataccaatagttctatagtatcttcgttttttcaaaacataaataaactctatttttttcccaagtcgcgcgcgtaaaaaaacggaaaacaggaaacatttttctcaagtcgtgcgcgtaactaaagaacaatgagtaaaaaatatgattaaatcaaggtttattgtgatttccatgtttcctctagcaccgaaacaggaaacacattttcacaaaagttgcacataaaattttttgtaacttttttttgaggccttgtggctcaaggggttagcgtgtgtttcctctttttaaaaactctcttaaagggcacgtttttacaaaattcgttttgatataatcaaaattggaatattttatagtcttttggcatatatttctgaatttgcagaacggaggtgaaaaagatggggaaatcatttgtaatacgaaatcaacgtagcttaaatggggaaacaaccaatgctgtgctagtaacactcaaatcttggcaaaagtttgtggaaacatttgaggagaaatactacagctataaagatacatatttagaagatattctgcagcacatgacatacgaagaacgtattgctgacgtagaaggctttgtcgaaaaagccaagccatctttttcacgtcgcgcaatgtctgcaattgcagaaaaaaccggaagaaaacataaattatacggtattacgaatgcagatcttgaagtattcttgtacttacataaaaaatgctatacaaatggtgtcattccaaatgtaacaatacatatgatgtgggaagattacaagcaatataaagaagagcttgcatacattcagcattctcaattctatatcgctttgaaaaagttaagcttacataacattatatctattgaaaatggcttagatggccgatatacaatcaaactgactcattttataaacgaggaaacagaaaaagcaaatccatacgtatatattagtcctgttgtatttacaaaggctttctttaaactatctgtagcagctaagaaactattcttagacattgcgatgcaacaacatacggaaacaacattaaagcgttctttggataagcaggatgaaagaggaaacaaaactcacttcggtgggatgtattgtttcttacataaaaaatatccgcatcaaatccgtgcggttatcgaggaattaacaactgcattaccatgtacagggaatcccctattcaaaatttgtaaaatgcaaaaaggtgtaaagcatacaaaacgatatacgacattatatctgtctatccattcagacttcttatgttcgaaagaagctggagaagaacaacatagggatccatttacaccaaaagctacctatgctcgaaaagcgaaatttatcgaagcagtcctacaagagatgaatatcggtgaactgtctgcagacatgaataaattcattcatgtcttaaagcatacttgtcaccgtcaaattcgcagtgtcattcgcggactacgtgacatggttgatcgaaaagaaggatatccaacgaaaattgtatatacattgaagaaattattgcatcaaacatctcaatatcaaattctcgatacagcagcaaaagaaggtatctaccctcttattgcgcagcatataccaaaagagagaaatagtgaccgtgagcaagctgtctttaatttcggtttacattattctatgtactctcttcacaacattaagaagatgtttaagaatgtgcatgcactactgaagcagaagtttgcggtaccagtgacggaagagtcttatcaccgtaattatctaaaataccaggaagaaacgttatttagaaaatatgcatatgatcagggagtgaatctccatgcatatatcgctttagaaattgaaatgcgtgaaaaactaaaagttcgtggccataaagaacgcacgattccaagtgatgttcgtgaatggtttatcgaggcaattgataagctgccacaagaaaaacttcgcgttattgagctaccaaagcagtttaatttactagagtttatgcgtaccttcgaacgtttagtacgtgccgatgtaacaataacagctccagatcaggtgctacacgcaatggaaacaaaataatagtaacgagctctctatttttgaaaaaatcgaaattagagggctattcgtagttgtttcattcatactccttttctactactctatttataaatacaaaatcagaaggacttcatgtaaaatgaggtctttttttatgcacttctatacaaattctcttctagcattatagaactctccacatagtgctagggagtattcttttaaagtagtaaaacctatctcataatacctacaaaaaatcagaagaaaaataataaaaatagtggatatgaggaaaaatatacttgaatgtgaataatattttcctgatatcattgtaactactagtgtcgttgtatttatctaataaaaatcatcaataataatgtgagttatgtgtatatactgagtaatgttaacaattagaagcttaatctggataaaatgtgggtaattgaacgctagatactgctgtatttaacaaaataaagaaaataaagcctatttccatagttggataaatataaagtgatttgtatcaatttctttccgatttcatgtagaaatatataattctctttatgcttttttgtagaattgatagtctaataatcattgaatttccgtatacattttctactatttatgattttttacgttctaacatcaaattttcccttgtgggagtagatctttcccctatttttgatacctataatagttttatctttatttctttttaatatataagatatatatttataatagatttttaatacagctagtatgattgttaataagatgtctgaccaaattgaaaatatttgtaaattacgttataataatggaaaataaacatatcattacccacatactaaaggacaaacctacgtatccctaccagggcgaggtttgtccttttttcattttagtaaacaattcatatttggaggattaaacatgactgtacttaaagatacgacttacttagatatagatacctataacgagattagatttttcaaaggaatattttggggattagtttttgtagttcctttttggagtattatgataaccctgtttattttactttatagataataatcaacatctccaaaacgcaaagggttgtttgtccgtttgcgttttggagatggcagcaaccgtgcgtagcaaagggcggtagcaggtctttcacttattttctgttataataattcctaagaaattaggtgattataatgagcaaaaacattaatttagaagaaacattagcagccttttctgcttatttaacagaaaaaggacgaaaacaatccacgattaaacgttatgcttacgatattaaagatttttataagtggctaagagaaaatgagaaacttctacatatcaaatcatggcgtgaactttctgaagcggactatcagacgtatttctctgagttagaagacaagcgtaaatattctcagaaaacaagacacagaatatgggtggttttgaagaaggtacacatgtttttaggtatagttagtccattggatggtattaatttctctttaattccggatcaatcactaaatgataatgattttattactgaaatggaagaaaagcttttaaaacaaactgttctatcaacgaagggcttaacggaaagacaagctaaatatcgccctcttattatggatagaaacgtttgtattataaatttagtagtaaactatgggttgtccttgcatgagcttgtatcgcttaatatgagccatataaagtttgctagaaatatcttaatggtacctggggagaatggagcaactaggtctgtctttttaactatggaagatacgcagcagctttataaatattacaagactattccggaaccagtaagacctagacaacacacagataatcctctatttgtggcatttgattttaatcgaggtacgtatcgttgggtatacgaaaaggatatgccaaaagctttgtctgaagttgctatacaaaagatgatacgacttgaagtgaaacgagcgggactaaaaaggcgtatttctgcgcagcagatgaggaacacttttattctccgtcttattaagcaaggagtaactgaaaaagatttggtaagtaggatggggttcaaaactaaaatatctttaaaaagatattatcaatatttacagtgacctgtaagtagacttagaataaagtttgatgaatactttttttaaaatatagtaactttatttcaactctatactaattgtcaattaaaaatttgaaaggttgatttgattgaaaggaaatatttttgggcagaaccttaggaatttaagaacattaaaaggaattagtctacacaaattaggtatcgagttaggggtaacaggaagtgcaatatcttcctgggagttaggaaataaagagccaaactttgatatggtaaaaaaaattgcaatctattttttggttagtacagattacttgtttaatcatcaggttttagataacgtggaacatgaaaaagcagttgttacacagttggctcataaattgtacggaaaatgcgaagatattctattattcgaagaggaactactctcttatattagttatttagatttcaaaaataaatccaaacatgtagcattaaaaaatattgaaaatgagaatcaagaaaaagattcctaatacaatacataacacataatatatcaaaaatgagcttaccttgaatgtattaatcacactaaaataaaaagacgtattctatttatagaacacgtcttttattaatttatttttctaatatttattaatctattagaaatgcctcgtttcctaattccttaagtacttttgcaaagagatggtttgtctcttcggatagtatttcctctgtttctattaatctagacagtctatttgtaaactctgcagcatacaaaagcttcgtactagctttttcatcttctttaaacaattgttcattcttcatggattgaattaatagctgaattagcatttgtttatgttgttcgttcttctttccatggtacatatccattcctaaccaatgacgaacaattcgttcagcgtctcttgcttctgttacatctactctagatacaacaaaggttagcttgttccatgttaactttgcaacttcatttgaataatttgaaggaaagaagaaaaagctttgttgtgtaattctttgccgctctttaatccaacgaaatagttcctgcttccctagatgaatatctatttctacaaaaaatacgggaaatggagacgttgttttttcctcatttattgtacaatcgggtttgaacaccaattcacctagatatgcgtggtgtataggttccaattcatctcggtatactctaattccatccgtttcataccaggcttgcagcactgcctcaatttcttcttcagaaataagatttgtattcatcttttgttgtgtaaaaagtagatactctaaaagcattcttctaccttctaccgtaagccctcctggtgcatagtctcctttttctgtgcgatcaaacataatataatcatattcagcatgattttgaattgaaaacaagtccgaatcccctttattttcgtttttaaggagtgtttgcagacttcgcctattcattacattccgataacgaatatcgtttctaatggagcgtaagaagcttttccatgattgtagataagcataatctgtatatccttcgcttattagttgggttagcattttatcctcaccattcatcataaggcaagtccaacagccactacgcgaatttgcagctccacaagcatttccttgttgttttccgcctgtttttatgccgcattcaaacatagcttgtccgtattgtatactcatttcttcaacgtccacaccaaaaggcagtatccctctatctaaaagcaacatccatacttcatcaccggttaagaatttgactggattaaagcagagtatatttttcatgtcattgtgacgtgaaaataaagattcattacttactgcatatttttgaatactatgtcttctacgtgcgctttcttcgttacgaacggccaacgcaaggactccatcatactcttcaaagcagtctactacttttttagtttgggaatctattagtatttccttcatcttacgttgcatgggtttaactttaagggaatcagtacaccatcgtagtctactatttcctgttggtggaagaacacctctacctagtagtttataccaatatgaatctttcattaatggtctcacactgtgtactataaacggaaggttttgcttatccgcactcttttggattttctttaatgtacgtgagatataagcagtcataacaggtgtttctaccccaacctcggaagttaatacatgaataggttttgtacgatcttctagcgacagctcggaaatcgcatcccatagcaatgtcaacatagcagaactatcttttcccccgctgtaacctacaaaacaacaatcgcgagataaatagacttttttcatttcctctttaatttctttatatatatccatcattttatttttatccccatagaaaaataagattctattttttatgtatggggcattcctcctttttttgagatagaaaaagagagtcccttaaaggcactctcttttatgtatttcctctatatttaatcgattacgatttcatttatatttagcttgtttaaggtctctttataaaaacgaattactttttgagcatgttgtatagctattaacccatcttgcacagtaagggcttcaaaataaggataacgaatgtctgtagcataaccattcagctgcacgcattgttctaaaatcaatgagaactcctcatctaatctacaacaaaatttatgcagcattaaaaggttatgagttttagggactggtctaccgtttagtgcaagaaatccttttaggagtttctccacacattgttgactatgataacaaataattgcagtggggaaaggtttcatatcagataagtaaatagcagaatctaaatcggattttgctatgaatacccactcttttagatcctcaatatttctcatataggaccgtcccttctagtgcaatcttatgttccatagttacagtacggctagcacgttcttgaaactcttctggcccatacactaaaatatcaactggcgtttccattacatcgtaaatcccccaattgatacgattaatgacttccctttttctttctcctacaccttccacaacaatacagagatcaaaatcactgtcttcatttggtgtgccatatgcatgagagccaaaaaggatgattttttggacagaagatacagtttcacgaatcttttgcaccaataggtccaattccctttgtacctcttcgttaatccgaatcacccctcggataatgtaattaaattgacgtttaagtatattatacatgcgtttctcttctccctgctattatatatatttttttttattgttttcttgttttccaacgttttgcaatgcttgataacattcgtatacctgcttgaagtctcgcaagaatccatcatcagaaatactatgaaatcctttgaagttctttctacaccaatataagagatcagatttatccttagctaaaaaagaatccggatagaaatgaatcagagcctctgctagacaagccagaagcaatggtatcatttcggaatcatgctttgataaatccagtacagatacaacggtatactgtttatattggtagtattgtagaacaccatcacacatgtttgttggtgttaatgtacattgtaattgagtggaatctaattgatacactctcactttgtcccctcctatatcattactcaccaattggtgcagctttcataaacgccttttgagcttgaaaaatgatatagtgatttgatacggtaccttcatcaaagagttcgttaatgaattgtgcaacagtcatggcagcgaacttatttgtaataacacgctgtggttctgaagcagctaattcggaacaacttaattgacttggtgctgtctctttttttgtaaaagcatctggaaataagtcgccaatcggagaaagaatgacctcaccattcagtttaatcccacatactgcttgaccgttataaccactgcttttataatcggccatttgttgaggtgtccaatgccttttatctacttctctccaattattaggaactgttacagctgtattccctacatcgatgtaaataagattatccgattgatggaagacttcacgagaaaacatattatctactgctccaatcacaattggcagatacaagtagtcgtctttatgttgtttctttaataaatcatatttattgccaaacaactgttgcattgtttctatgtcttctatgtattgtgacgtataggaagagataggaacgttatagcccgctttatatcgaagagccagtacctctgctttgtatttaccaacatcaggtcgaataaagagttgatttccaaggtttttagtttctatgatatctggatcggcaactactatttcaccgtttaattggaaaatactcatcatttgagcaatatgctgtaaaattaatccaccatttcctccagcacctactaatacaatatgcggtacaatcttctttccttctgcaatatcaataacaatactcatttttatagccccctatttttcttttgatagtgtattctctaaatttcgtagaaatggaatcgataaatttgtaatccgatgcacggtatacaagtcaaatgaatgcttcaatagtatcgatgcagcatggacgactccttcctcttgtacaatgtctaaaacatattgaagtaaattcaactgcacaacaagcgtatctatatattcttgatgcatgtttatatcaatatgggtatcttttccgtgtccttctaatactttatgtatgttattcatctctaactggcacataaattgaaatagtttataatcatgaattggttcctctaaaacacgttcattttgtttaagaactaacatgtaattttttatctttgtaaacattgaaatgtgaattgtttttaatgttgtcataataaagaaagagacattaaaatatgtctcttttacgcccccttgtatatttattttaaaagtgtaatcctacttaaatcgtaattttggcttatccctttcgctgcatattctcctgcaaatataaagttagggttaatagaataaaattccccatctagacaagtgcgtacacgcagttcagggaaaacagcttctattctgccgataattgcataaagaataggagcccgttcactttgatcatctaaatcacttggttcagcagagaaacaatgatgactgtgtatctccataaccttcatagcgatagactgcatctctatattcgtttctgggattacaatttcagttgctacctgctgtcgtggaaagtccataaaataaccacgctctttattgaaatagatatcagcatgcaattcgcaatcacatttacgagaaatggcctgtgcaataataataaagtccattaatagggtcctcggaatgaaatccccaggtaaaaagtgatcacgccaagtacttaaaaaagaaaaaggacaatctgaaatggattgtccctctacagtacttgctccttttgcgccgacagttaaaatcggaagtagtgcatttgtatcctcatcaaatttaatgacagttaagcctttaacaaatgagggataacgttgctctaattttacgcgaatgtcctctgcttctattttccttacatctgtagaatctccattttgaacagcgattccatgtgtaatttcttcctctgtaaaccaatctactaacgatatatctccaaataccacgtgacgaacaaccgttgttgtattgattttatctagacaatctgtagcttttgcagccttagctttcttactattctttgtcttatcttttgctttttcctttttctctacttttttagcagtggcttgctctgaagcagcttttttcactggtactgttgtttcctctatttgtttttccatatcaaaaaaatcgaataagttattcatattaaaaatcctcctagtatgtttgcttatatataatcctgctatttattaaaaagtaatttccgattctattagaatagaatcatcaaacctttggttttcaaatcgtttaaataactctcctactggttccgtatgagtatatgtaaggtcatggttgaatgaacttgcaaagaatagaacgtgaaatgtttctagatcttttaaagtccggaattcaggtattacaactctacccgtacatacagatccactagcatgaacattagagtaaggaaattgatataatttcattccttcttctaactccatatcttcttttacagcaaagacagagatattcgtaactcgtttttgatacaccgtataacgaaataatagacgtggaaagcctacttgttgaaacggccgttcaaaaaaatgaatatcccactgagcctttggtacttcaatccaaacagcttgtttatcaccactcttagataacacctcgtgttttatacaaccttttgggagtacgccactagagtaatgtgtattatcttgtgtaccttgctccatcacttcttttaaagctaaataaaaatctttaaaagtaacggcagtttctccacgcgataattcgttgttaaattgctggatggttacaattccttttggctctaaagcatcaaatattgctactgtcttcatgtgttgtttccccctgcttaaagattgtttccaataaatctagtaacatctcaaatttatatggtccgtataaaggttcctcgccataatagagataaagagattcttcatcaatttggtaagaatactgcaccggataacaatctagtaatttagatattttttctttatgattcggtgatatgccatctattgtttcagctatagcaccccatgtttcctctgctactttctttatttcatttaatggtatgtcgaatagtgtagagagcgtttcatactcttcttcttcaataggaaagacttctaagcccatctcttcgatcatgtccgttcccaattccacaaattcttcttcatggtctaattcataaatattctcttgatccaagtacacgggagaatactgtgttacattactcgaaagcgaatgcatccttttaaagtaatgtaagtaatgaaattgacacgggtaaaagcaagatagatttatatgtaataggttcatggaaagtaagaagataacaatcgtatccgtggattctatgtccctccaacttaatgtttgattcgtatctaaaaagtccacacaagttaggatcttaccgattgcctcatgagagattttgctgaaatctatctctatatcttttgaaaggctttctaatatatatatttcctcttggtatttttgtttaatgtgttccagattataaatgctaacttaaatatgtacattaacgcttgaataaatatgtacattttcaattggattctccatactgactagtcagtatggagaatccaattgaaaatgtacatatttattcaagcgttaatgtacatatttaagttagcatttatagtaggccattattttgctttttcgttatatcatatagtataatattcaaaatcagcaaggattttttcctgaatttttgctgatgaagatggaaaaatttttcggctttataggttgataaagttatgtcgtaacaggaaatataagaacagatatataaataaataaaaagaacataaaaacgcaaataaaaacgaaaatgaggggaactttatgagccaaaatcaattcgaatgtcgtatttcagaagaagatgtacaaatgttaagagcgttagctcacccacttcgtctacgtctagtaatggaacttatgcaaagaggaacatgtaatgtaacacagctacaggaagtattagaaattccacaatcaactgtttcacaacatttaacgaagttaaagcaaaataaagtagtacgctttgaaagacgaggattagaagtgtattatcaaatccataatgataaagtaagtgcggtagtaaaaacattattttcttaaaatttgaatattatggaaaaagacgtgtagaatatacgtctttttttatttgtcagaaaggtagcgagagagtaaatattagcatgttaggaagaaatgactatcaatcaacatgctgccttacggaatatattctaaaaggaaaagaaaaaatagaaaggagtgtagtaagcaaaaggagggatagtagtatggatgtgaaacgtgtgaaacaaatcttatcttcttcaagtagaattgacgttacatatgagggcgtaccagtatggattgagagctgtgatgagcagaaggggagtgctcaagtgtatgatgtatctaatcctggtgagagcgttcatgtggacgtgacagctttagaggagaagtaataaaaaagacgcttctaattttagaagcgtctttttgttattccatcatatgtgcaattttcttagagaacataagaagtactaatcccagtacaattacgataataccgatgcttgcgaatacttctaaatatcctaaagattgagtgaaagcggctaattgtcctgctaataagtttgcgaagccagtaccagctaaccatacacccattaataatgatgctaatttaacaggagcgattgcacttaccatagataatccgattggtgataagaataactcaccgattgtgtggaacatgtaagtgaatacaatgaatagtaagtttgctttcattgtaatgttactttcatcgctaccagtttttaaaacagctaaagttagaactaaatatccaatccctagtaaaatcatacctaatgccatttttgttgggattttcaaatcgccattttttgtttttgaaagtttaatccataacgcagaaacaggtaatgctagtaagataatgaatagtgggtttacagattggaaccaaggtgttggaattgtaaatccaccaattgtacgatctacgaacttatctgtgtaaagtgttaaagaactaccagcttgctcaaatcctgcccagaagaatacaacgaaacaagttaaaattaaaattgcagcagtacgttttttctcttgtgttgttaaaggttttttctcaattgcttttgcatttttttctttagatttttttcctacaacagttgttccgatagaccctaagtaacgaggtgctaagaaattaaaggcaagctgcccaataatcataccgatacaagctgttaagaaaccgtatctataatctgcgaagtaaccgcaaatgaatggagcgataagagctcctaagttaatccccatgtagaagatagtgaaggcactatcacgacgagaatcgttttcgctatataattgacctaataaagtcgaaatatttggtttgaagaatccgttaccaataactaataatcctaatcctaagaaaagtccagtttttgtgttcattgagaataatacaaagttaccaattgccatgatgataccaccaatagtaatggcatgtcgcttcgtaatgaaatggtcagttaaccaaccaccaataataggtgtgaagtatactaacattgtgaaaataccgtaaatttgaactgcaactgctttatcaaatcctaaaccgccgcttactaagctcgttgttaaataaagaactaataagccacgcattccgtaataactaaatctttcccatgcctctgtaaagaacaacaagtataaccctggtggatgtttttttggtgattgttgctctccagctttgtctaattttaaagctgcatccatttttgtttccccctaatcctgtataacggatatttatgtaatcattttaatttacaaaatatttagaagtcaatagaattatatggaaatagaaagaaaatttctaaaaaagttctatttttcttcgaccgttactgtattttgccctgaaaacgagatgataagcgttttcaaatgtaataattgaattctaaaagaaaataaaatagtgattaatcagaaaatttagattaaaacatttattctgatataaagaaaaaatattctatttactttctcaatataacatattgggaataaaaatacaaaacgaaataatgtgacatttaagtgaattgaaaaataaccagctccacagaagggagctggttaaggaaatattatttaacaaagcgtttttcgatgtcatctaatagtaggttagcggccattacgccaccagctgtattccaaataacgtcatcaactttgtatgctttaccattttttactgcatttaaatttttaaatagaggatcgtttatatactctttttctagttcagatccttttttctcatttcctttatcgaatgtgaagtagaataatacgtcaccatccatagcagaaatacgctctttagatacgttacgctctgcaaaatcatctttattttgatctccaggacgtttaaatccaagttcttttaaaataacaccagagaatgtatcgccatgataaatacgaacatcaccaggcatgaaacgaaccatagagatttcttggtttactttatcaccaagtttgccttttaaatcttttatacgtgattcgtaatcagctacaactttttgaccttctttttctttatttaatgcttttgcataaaatttgaagttatctttccattcaccacgtaatgtatctgagaacacagtaggtgcaattgcttttagttgttcgtacactttttcgtggcgcattttattaccgataattaagtctggttttaaagaagcaattgtttcaacgttaacttgtccttcatcaccaacaacttttacatctttcattttatccttaatatgtggataccatgggtcaccagtccaagactttacagcaccaactggtttcacacctaattcaagtaaagcttcagttccttcatttgttaagataactacacgttttggattagcaggaacttctgttttacccattgcatgttcaaccgtaatcatttctttttttgtatcttctttcgtatttgattttccacaagcacttaaaagtagtgaaaaggctaataaaaatacaaatactgtaaacgaattttttcgcatgaaattcattatgtaccccctacatagtgagaatttttttcaatagcaagcatgatgttaagtctttatctttttattgtcaatacatatggatgaaaataattctcatttccgttgacaatgagaattaagttgaaatacactaacaacgtatcattatacattgaaggggaaacgctgcatgttattaaaaacaaatcgagcaaaatggattggattatttgttggaatcattgcagtcgttatttgtatttggggaagtattatttttggatatacaaatacgagttggaaactagcattggatgcttttttccattttaacggttccaatgaacatattattattcaaaacgtacgtctgcctagggcgttaattgcagctagtgttggtgctagtttagccattgctggttgtcttatgcaaactttaactaagaatccacttgcttctccagattttattggattaaattcaggtgctgcgttcttcatagttgtagcaattgtaatcttttcagtaacatcattatcagctttcacatggattgcctttttaggagcggcggttgcagctgtacttgtatttgcttctagttctttaggaaaagaaggaactactcctcttaagttaacgttagcaggggtcgcaattagtgcgttattttcatcattaacacaaggattacttgtgttaaatgaaaaagcacttgaagaggtattattttggcttgctggatctgtgcaagggagaaagttagaaattttacaatctgtattcccatatttattaataggatggattgcatctcttatgatggcagggaaagtaaatacattgatgatgggagaagacgtcgcgaaaggacttggacaacgaacaattttaatgaaatcattcgtgttacttattattgtactgttgtctggtggttcggttgcggttgctggcccaattggatttattggaattattaccccgcattttgccagatttctagttggagtagatcataggtggagagtaccgtatagcggtttattaggtgcaatactattaatcttagctgatatagcagcaagatatgtcattatgccacaagaagtaccagtaggagttatgacagcatttattggagctccattctttatttatattgcacgtaagagagggcttagcaaatgaaaaaatatattccgtttcgtatagggaaaggcgggccctcgtttttaatgtataaacgagcttgtctcgtcttatttagtttattagttgttttaataggattattttttgcgagtgcaggtatgggagacatgaaaattgctccttatgatgtatggcaagcgatcactggaaatggcgatgcgatgtctaacatggttgtaaataagtttcgtatgccgcgtattttaattgccatcctcgtaggaattgcgcttgctgtagcaggatgtattttacaaggtctcgttcgaaatccacttgcttctccggatatcatcgggattacgggcggggcaagtgttgcagttgtattgtttttagctatatttagtgataaaaataatgcgctaactgtaagcattcattatatgccgttagcagcctttgttggggcaacgattgtggcgctttttgtatatttatttgcatggagaaatgacgggttatcgccgattagtcttgttttaattggtgtggggttttgggcattaacgaaagcggcaacgactttgtttatgttgttagcaccaatttatcaagcgagtcaagcgaatgtatggattacaggtactgtttatggttcttcatggcaaaacgttatggtgcttgcaccgtgggttctcattttaacggtaatatcatttatagctgctagacatttaaatgcgcaagagctaggggatgatattgcggtaggacttggtgttcctttaacgaagtcacgcgtattcatgttattacttagtacggctttaattgggggagcagttgccttcgccggaggaattggatttgtcggtttaatggcacctcatatttcacgaaggctagttggttctttatacggtgcattactcccagttgcagctattgttggtgcaattctagtacttgctgcagatttaattgggcgtacagttttcacaccacttgaaattccagcaggggtatttacatcagcaattggtgcaccttattttatttatttactttataaaagtcggaattcataaagggagatgaatatgcaaaaagcattggagacgaaacgtttgacgttgtcttatggtgaaacaattattattgatgagttgaatttagaaattccaaaaggtgaaattacaatctttatcggttccaacggttgcgggaaatcaactttattacgttcactagctagattattaaagccaacaactggtgacattttgttagataatcaagctattcaaagtatgcaaactaagcaaattgctcgtcaaatggcaattttaccgcaaggaccgcaagcacctgaagggcttacagtattgcaacttgtaaaacaaggacgctatccatatcaaacatggctgaaacagtggtcagaaaaagatgaggaaatggtacagaaggcacttgcagcaacaggtatgacagaatttgctgagcgtgatgtgcatgctctttcaggtggacaacgacaacgtgcttggattgcaatgacgcttgcacaagatacagatattattttactggatgagcctactacatatttagatatgactcaccaaattgaggtgctagatttattattcgaattaaatgaaacagaacaaagaacaattgtcatggtattacacgatttaaatttagcatgtcgctatgcagataacattgtagccattcaagataaacaaatatatgcacaaggtaaacctgaagaagtggtagatgagaaactagtacgtgatgtattccgaatggagtgtcaaattagtacggatccgttgtttggaacaccgctttgtatacctcacggaagaggaagacgtgtagttaaagaagttgctcaggcaatgagataaaaaaacgatgagtgattcatcgtttttttatttggtacaagaaaataagaggaagagaggaatacgtaagcgacgtttatactcttcttcattttgaaaataggttggatttggtgtagcttcttttaatgatgtaatggtaaatccggcttgctgtaataatgtgaaataatcttccgttgtacgatgatatttaataacttcttggtcaatccatggttcaacccgtttgcctagtttaaagtaatcatcgacgagccaactcattcttttaccacttgtttgtaagctttcaaacgaagaagtaataacaggatgttgaacgctaaaggtaaaggtgccatttgtttttaaagtttgaaacacattttgaaaaatgctatcaagatgttcaatataatgtaaggcgagtctagatgttactaaatcaaaagtggaagaggggtaggtataatctttgaggtttaaaaaatgaacagttccatttttattttctagttgttttttagctttttcatacataagttcggagccttcaatgccggtgtaagagtagcatcccttttctaataattccgcgccaaacttagcatcaccacagcctaaatcgagaatttgttttcctcgtacatgaccaatgagctgaaagaatattggtttttcaatggattcatttgggctattttctcggtatcttcgtttcatatattgttcgaaaaatgctgtgttattgtatacatcagattctgtaaatgccatgtttgaaacctcctgaaatatttttttaattctatcaaatatgaaaagtaaataatagatttattgtaatgaatcatatataatctaaaattgtaagcggttactttaaactatttttctataataaattctgaaaacgtgttaagctagtagagggattattagaactattaagacaataatccgcttacatgaacgatgggaggcttcacgatgtctagtaaaacacttgcgaaatttttagaagaaaatttagaggatttaaaatcaaaggggctttataacgtaattgatccgcttgagagttcaaatggaccgatcattacaattggcggaaaagaatatattaacttatcttcaaacaactatcttggattagcaacagatagccgtttgcaagaagcagcaattggtgctattcataagtacggtgttggagcaggggctgttcgtacaattaacggtactttagatttgcatattaagttagaagaaacaattgcaaagtttaaacatacagaagcagcaattgcttatcaatcaggatttaactgtaatatggcagcgatttcagctgttatggataaaaatgatgcaattctttcagacgaattaaaccatgcttctattattgatggtagtcgtctatcaaaagcaaaaattattgtttataaacattcggatatggaagatttacgccaaaaagcaattgcggcgaaagaatcaggtctttacaataaattaatggtaattacagacggtgtcttttcaatggatggagatgttgcaaaactaccagaaattgttgagattgcagaagagttagatttaatgacatacgtagatgatgcacacggttcaggtgtacttggaaaaggtgcaggaactgtaaagcacttcggtctttctgataaagttgatttccaaattggtacattatcaaaagcaattggggtaattggtggatatgtagcagggaaacaaaacttaattgactggttaaaagttcgttcacgtccattcttattctctacagcattaacaccagctgatgcagcagcttgcatgagatcaattgaaatcttaatggaaagcacagagttacacgatcgcttatgggaaaatggccgctacttgaaacaaggattaaaagaacttggctttaacattggagaaagtgaaacgccaattacaccttgtatcattggggacgaagtattaacacaagaatttagtaaacgtctaaatgaagaaggggtatacgcaaaatctatcgtgttcccaactgtagcaaaaggaacagggcgcgttcgtaatatgcctacagcagctcatacgaaagaaatgttagatgaagcaattcttaagtatgaaaaagtaggaaaagaaatgggcatcatttaagtaacgacatcttttgaatagcttgcaaatgaggagtggggaaaatgaaaaaaattctagtaaccggttctttagggcaaattggttctgaactagtaatgaaacttcgtgatgtatacggcgcatcaaatgttattgcaacagatattcgtgaaacagatagtgaagtagtaacgtctggtccatttgaaacgttagatgtaacagatggacaaaaactacatgatatcgcaaagcgtaatgaagtagatacaattattcatttagcagctttactttcagcaacagcagaaaaaaatccgttattcgcatggaacttaaatatgggcggacttgtaaatgcattagaagcagctcgtgaattaaactgtaaattcttcacgccaagttctatcggtgcattcggtccatcgacgccaaaagataatacaccgcaagatacaattcagcgtcctactacgatgtatggggtaaacaaagtggcaggagaattactgtgtgattattatcatcaaaaatttggcgtagatacgcgcggtgtccgtttcccaggtttaatttcttacgtagctcctccaggaggcggaacgactgattatgcagttgaaatttattatgaggcaattaaaaaaggtgcatacacctcatacattgctgaaggaacgtacatggacatgatgtatatgcctgatgctttacaagcgatcatttcattaatggaagctgatccaagtaagctagtgcatagaaatgcatttaacattacagcaatgagcttcgagccagagcaaattgcagcgtcaattcgtaaacacattccgacgtttacaatggattatgcagtagatccagctcgtcaaacaatcgctgatagctggccaaactctattgacgcaactgcagcaatgaaagagtggggctttaaagcagaatacgatttagacaaaatgacaactgacatgctggctaagttaaaaaaaaagctcacagctgagttagtgatgaattaataggaagagtcgattcttaggaatcggctcttcattatttttgggaggagagaagtcttatgcaaagagttgatgtcgtatacgcactaatacatgacgaagaaacagataaaatattaatggtacataatgtagaacaaaacgtttggtcattgccaggtggggctgtggaaaaaggtgaaatattagaggaagcactaataagagaagtgaaagaagagacaggtttaaccgccttggctggggggcttgttgcgatcaatgaaaaattctttgaagaatcagggaatcatgcactattttttacattccgagcgaatgtagtaaaaggggaacttattgcggaagatgaaggtgaaatttctgcaatagagtgggtagatcgaacaattgcgaatgagcgtttcccatactatgacggaggatttgaatctttattagaagtagccattccatacaagtttcaaccagaaacaaagtaattgaacgaaaaaacaggagccataaggctcctattttctattcaatcgtcttcagtaatagttttttcagcaatggtttaatcttcaatcgtaaatcttcagcatgatttgcaactaagaagtgatggttataaatgtttttcatcaattgataagttgcttctttcgcttcgccttcttcgatgaagataccgattacttccataccacttttacgcgcgagtttaacagcttcatgcgtatctaaaattccgtcttgttgatagtctagcgcagaaggctcaccgtctgtgaagactagtaagaatttatgtttctcaggtcttttggcaagtttttcagaaacgatacgaataatatatccgtcgcggttatcttcttcttcacgaagttgcataatttctggaccaacgtttggcaacgttgagtttttataatttacaacttcatggataacgttcggcttatcttcaggtttagcgctagaggcatcttcccaaaatccgctaatagcgtgcgggatttttaaagactttaaagcttcatgaaatagtacaacactcttcttcgtttcttccattttgttatacatagaaccagaacagtcaactaatagttggaatgcaacatcgagttcttgtgactcttgtccttttttataaaacatacgcggttgtttttcggtataaatacgaaggaatttcttacgaagtcttccgtaatatttatcactattcgcattcgttttattttcaattgttttttcgataattttctttaattcttttacatctttattgacgactgatttgatagcttggtaatcttttttctcatctgagtttggtttgcgagcttctttaaatgtatgagaagcacctacattatacttaccgtatgcaccgtcgtgctggctagaagcgtgtgaagcccttgcttcttctgtatcagcgccatcaaagttggattgtgtacttttttgtgaggtaccttgtacagaaccaagtgcttggtcgccatcttctgattcacgggcagtatcacccatcatattagtttttgttccgctttctaattcaaagcgtaaaaagttctcgttttcgttatttttattttcacgatgccatgtggagaaactttcatccattttgtttttattttcatcgtcatctataagctgcgtatcatcatttgctaaatcttcgacgcgacagttcttttcgtctgcaaggacagataagtaaagtggagcatgtccgaaatagttgttaagcatatcgctttcaagaagcgcctctaagcgatagcgaattttctcaacgatatacataatatcttcagtattacgtgcttggaatgtttcatgtaaaatcgcttcaatttgctcaaaatattcattattaaacatttcgtatttatcgctagttaatgaaagatagcataggcaaaatagacgatcaccgtgataattacgaacacggtttatttcattttgagagccgaaataattgcggtacatttcttttcgacgtttaaaaacatgcttcgtgccaggacgtaagttctttacgatttcctcaacgcgtaaatcttctaatagaacaaataattgtgttaaaaacttttttaggggcgattcttgcaattcaatcgcataagagcgaattaaagtcatgtccgagtaatgtttattaccaagtgcttttaagaacacttcgctttttaatccgattactgtatcttcttcttttcgatcatcccaaaagtgactaatgacaactttcttttcaatttcgtcgtagtatgctttatagccatattcaagataggcatcgtcttcttttagaagggcatacattaagttttccatttgtagaaacagcgacgcatcaatttttttgtcactaaaaatttgtctcataaattatccctcaaagaaataactttctgctaattcacggacagtcatttgttctgtttcatcattaagttttgcaattatgcttcgttcaatcgctcgcataacaggaatatatacacctaaatcacatgcgtcgataataccacgaatacttgctgcttcttcacttacacgtccatcgcgagctaaaggcataaggtcgcttgcaaatgcaacaaacttttcaattgttgcaacatcatttaattttgattctgctaataatagttcttttaatgtatcaccttgaatgtaaggaacttcaataataacgaaacggttttttaacgcttcatttagttcacttgttccaacgtaaccttcgttaatcgcagcaattacacggtattcgtcatcaccgtatacaacctcttgtgtaaatgggtttgtaatcattttacggtaatctaatgcgccgtgaagaagtggtaacgtttcaggttttgccatattgatttcgtcaatatataggaagtgaccgttcttcattgctttcataagaggaccgttaacgaatgaaacttcagatgcaccatctttcgtttgtagtgtgttgtatcctaaaataccctctacatctaagtcgacagagcagttaatgctatgcattggtttttggaataaagaagaaagagtttccgctagtactgttttaccactaccagtcggtccttttaatagaatattcttgccaagaagaagtgctgtaatcgcatcttcaataatgctattatcagacgctttatatattttcgttccgattaaatgtgcattttcaccagcttcttgtttattcttttcatgaatcgtagaaagctgttgttttaaatcagcatgtatatgaaattgttctaacatgtatttcccacctaacattattttcataaagtaatacatcttatgataacttgttttaatatggtatgcaaagaaaaggaaggaggataaagggaaaagaaaaagcaatcaagatgaagttgattgcctacagtaaaggagaaatgagcctcatgaaagactccaatatgcgtttttttatacttcttttttggaaagagttccatttaatttcagttgaatgtttaaaatcttcttcaaaatcacgtttaatgtcgtgaactgtttttgattcataaagaacgctaataatttcgtaattcaattcaaagctacgtacatccatgttcgctgttccaatagttgcaattgtatcatcaacgagtacaatttttgcatgcataaaaccatctttataactgtaaatagaagcaccagcttttaaaagcggagtgaaataggattgagatgcttgatcactaatgatgctatcacttttacctggatataaaatccgtacatctattccggcaattgcacttaagcgtaataatgttaaagtttcttgatctggaataaagtagggtgtagcgatccaaatggatttttttgcagagcccataacagctaataatgtattacgaatacttttatcatcggagcttggtccgcttgctacgatttgaacagcaccttctgcatttgaaatctctttacctgggaagtattgtctattcatgaattgatcccaggaataagtatttaaaccactagaggcatagagccagtcttctagaaagattgcttgtaatttatataatgcttttccttctatttttaaatgactatcacgccaaacaggaaatttcttggaacggccaagatattcatcaccgacattgagtcctccggtaaaaccaatttttccatctacaataacaatttttcgatggttacgataattgacagtttcaagtaaccaagctgaaaaaatagggtcaaattctacaatttcaatcccagcttctttcataggttgcaaaaatcgtcgtcgtaacgtattacttccaaggccatcataaaggaagcgtacaataacaccatcttttgctttttgtattaaagcatctcgaacttttgtaccaatttcatcagatttataaatgtagtattgaatatgtatatgatgctttgcctgctctatagctcgcaaaatctctgaaaatgtttgatctccgtttgttaaaagttttgtagttgttttatctgcggcaggaccacctccaaatttttgtatgacttctgttaaatgtatggaacgttcatttagtgggactgtgagtaataactctagtcttcttccttctaatatttcacggaataattttctttgttcttctgaacgatggagatgtttttttcttctccagcggctgcgtccgaaaatagcgtataaaagcacacctataataggaagaagtgctaatactaaaaaccatgctaacgtactttgtggagatctattttctataaaaataacgaatgaaattccgacaattgtgatggaccatagagcaccgacaaatgtatataacgaaatatacgatgtatttaataggaacagaacgatagatacaattgtaaatattaatagtaattgaacgataggcttcttcatttctatataattcccctaatcttttttcaatatagacttcttaaatagaagatgtaatatgacatctttattataaggtgttttgctttttttacaaaatatagacatttcacctatactttccgcatttgtcctacatacagtgtactatcccattttttatcccactcttaacgcatatgaaaatgaaaaaatcgaaaaggagcggagaaacatgaattatatagaaaataatggattgtactatcgaaatcatcatcatggtggacatcatcaccatggaggacacaatcactatgatcaccatcatcatcacggaggcggatggggctggggtggtggtagttcatggggaggcggatttttccctggaagctttgcaggaggagtgttaggcggactgacagctggtgcattaacaggtgcaacaagtggaggatattatccggctccatatccagtagcttatccatcaccataccctgtaacgtatccaatgccatacccaggttatcagcaaataccatattcgtattaaactaaaaaagaggctatcctcttttttagtttaatacagtatttatttataaaataattccaaagttaaggtggaaatatgttaatattttgttattgtaattcaaaaacatgcacattaatgtagattttcatattattatttgtgaatagttatgtagtatgatctaatttctatttcgttattaaaaacaaagagatcagatatgagtggtattagttggaaacaaggcttgcatagagctacttaaaaggattgcggtataataaggcgcgaagtaattagagatatgggaagctaccagttataattgaaacggtataatattgctttttattacaaataatattatgttattttaatcggtttatttaaaaagataatttatgtaaagggctagtattagaaaatgaaatatctctatttctatgaagagaaacaggttgtgttttagtcagatagaagcaaggagagatgcgcatgctagaacagagaggtcatgcattatatgactcttcgttgcgagatttaaagttagcattagatgagtcttcaattgttgcaattacagatcgaaaaggtcttattacatatgtaaatgataaattttgtgaaatctctaaatacaaaagagaagaattaattggaaaagatcaccgtattttaaattcaggtcatcatccgaaaaccttttttcaaaacttatggaaacgtattttgaatgggaaagtatggacaggtgagattcggaatcgagcaaaagatggtacatattattgggtcaaaacaacaattgttccatttttaaatgaaaaaggagagccttaccagtttatcgcaatacgaaatgatattagtagtagaaaagaagcggaacagaggttgcggctaagtgaaagtcgttatagggaacttgcctatcatgatgctttaacgagtttgccgaaccgtttgcaattaataacgaccgttaataaattgattgcagataaaaaagaatttggtatgatttactttgatttggaccgttttaaattagtaaatgatacgttaggtcatatgataggggacttacttttaagcgaagtcgcttcaaggttgcattatgtactaggagagaaagatgttctggctaggctaggtggcgacgaatttgtgctgttaacaaaaaatcatagacaagatgatatgaggcagttagcgacatctgtgttgtcatgtttccaggcaccatttattcttgaaggccatgaagtatatatttcagctagtctaggactttgttcttatccacaagacggacaagacgtggaaacattattgaaaaactccgacttagctatgtatagtgcaaaagaacaggggagaaatgctgcatgtttctttacagatgagctacgcgcgaaaataaatcgtagaatgaaagttgagtttgctttgcaaaaggcaattcgtgatgaagagttagatgtagtattgcagcctattattgatttgaaaacgaagagatattctggtatagaagctctagtacgctgtatgacagaagacggacctatttcaccaaacgaatttatcccggtagctgaagagtctggacttattataaagctaggagactgggtattagaaaaatcgtgccgattgtttaaaacattgcccaattatcaagaaggactaaagttatcagtgaatttatctatacaacaattaatgcagaaacgttttattttctctgtacgtagcattttaaagagaactggttttcctccgaaccgtttaatattagaaataacggaaagcatagcagtccgccattttgattatattattgctacattacaagaattaagaaatatgggtgttttaattgctttggatgatttcggaactggctattcttccttatattatttaaaacaactaccactggatattgtaaaaattgatcgtaattttattcgtgaatttcattatgatcacgcacaaccagaacgaacgattgtaaaatccgttattgaaattgctcatagtttaaatttagcagtagttgctgaaggagtagaaacagtagagcaagagagtttgttacaatcaatgagctgtgattatgtacagggattttattatgcgaaacctttatctgtaggagagctaaaagaaaagttaattacagatttttaataaaaaagagaagccagcagcttctctttatttaatccgttttttgtgagtctttcattagtattggataaagaataagacctaatacgaacaatccaattcctaagaagaatgtttttaaatcagcagttcccgttttgataacccaaatagagtataccaacgctaatgtcgtaatgattccatcttttactcgagatccgggcagtatatcatacgtttctcctgtaataactaattttaattggtacaaggtagaaacaaggtatggaattaaataggctaatgttgctacgacgatagcgaaactatacgcttctgaaacagtaccagaaatcgttgaaaataagaaaatttgcgtcattatatttgtaatcaatagtgattttgaaggactaccttttttatttgttttcccgaaaaacttagggaaaagtccattttttgctgcctggtaaggtacttctgaactaacaacaatccagccaactgtagatccaaataaagatataagagcgagtaaagccattatatatgcacctttatttccaattgctaaatttaatgcgtctactaatggtttttgagactcttttaaagcatcttgcggaagagctcccattgtaagtaaagtaattgacatgtaaataagaagagcgataattaatccgaaaatcgtagctttttttacatcgcgctgtgattttgcacgattagaaagcataactgctgattcaataccgataaatgcccagagtgttgcaatagcagctgaattgatttggccacctaatgagattgattgtcctgcttcattcataaaggtttgaccgtctccgaaattagaggcgttgaaaatgaacaatgtaattacaataaacattgtaaatccaataatttttgcaatagtagcaagtagattcatatttccagctcgatcaatattttgcgaaagaatatattgaattccccacagcataaggctacatacgaggaaagttaatccttttccgagctccagtgaaaatccatttattgaaaaaagaatttgcttactttgtaaaactggaaagaatgttgataaatatccagcaaaggaaataataacagatgctgttgcagcccagttagcagcccaatatccccatgccatactatatcctgcaactttaccagctttttttgaaggaaacatcgcttgagcatagctttgtggtccagcttttaattctggtttccgaatcgctaaatttccaaatacaagtgcaatcataaatacgccaaggcctgtaatactccatgcgagtgtagaacccattggacctgatacttgtgctaaatttgctggaagcataaatacgccaccgccaaccatattcccgataacaaatgctgttaaaacccataatccccactttttcgtttccatttttgttaactcctttgtagtaagttttgcttaaacatcattttttactagctttttgacaataaaaaaagagccatgtagataaaaaaatacctacatggctcttttgccaaagcgtaggtacaacgggaataacccttgtacctacgcgtaatttttccgctaggtttcaagggttacgtatgatgatgatgtttttgtgcaaatgtaactacagttgttgtataagtaagcatagttctttgctccctttctcctctgattttgaagttagtatactacatgtttttttgaatgaaaagaaaaatataaaaatttttataaaaatacgttttaaagattaaatatttacctatatttttcttgtactggaaaataagtgagagattggcagaagagtgaagcatgttataatacatatagaattagaaggtgacaaggggctagtgtagatgatgagtaagtatgaacaaatttatacagaaatcagtaaatctattgataataaacaattaaaagagggatgcaaaatcccatcagaaacagaattaatgaagcagtatgaggcaagccgaggaacggtaagaaaagctgtagatttactgcaagagcgtggatatgtgcaaaaaattcatggaaaaggtgtttttgttttaaagcgaaaaaatattgaatttaattttggcggtattgtaagtttccaagaagaaaatgaacgtttaggacgtcattgtattacagaagttgtggaaatggacaaagaaaaagccacaaaagaaattgcaaaattattaaatgtaaaagaaaaaacagagattgaccatattaaacgtgtacgaaatattgatggagaaaaagtaattttagatataaatcattttgtatctgagtttgttccaggattaacgaaagaaattgcaactgcatcgatttataaatacatcgagaaagagcttgggctacatattagttattcgcagagagtaattgaagtacagccatgtacagaggacgatagaaagtacttagatttaaatggaacagactatgttgtcgttgtgaaaaactttacacatttgtatgatggaagtcagtttgaatatacagaatcacgccatcgtttagatatttttcacttttcggatgtggcacgcaggaagtaaagaggtggaacaaaatattgtttcatctcttttttttataaaaaaaaaacataaactcgtatatacgagtgttgactaacttatatatacgagttaatatgtaattgtaaacggtatcaaaaaaagaaaagagggacgggaatatggggaaagactatcgtaaaacagcagaggaagtgttgcagtatattggtgggaaagacaatattgaacaagctgcacattgtgtgacgaggctccgtatcgctttaaaagatgaaagcaaaatagataatgataaattacagtctgtttcattagtgaaaggagcgtttcataacgctgggatatttcaaattgtaattggtccaggggatgtagatcgtgtttacgctgagttgataacgcttgcaggtatgaaagaatcgactgtagctgacgtaaaagactctggaaatcagaagttaaatccagctcaaaagtttgtgaaaatattttcggatgtatttatgccgatattaccagcgatcgtaacagctggtttactaatgggtattaacaatctattaggcgcaaaggacttattttttgatggaaaaaatttattagatgtttatccgaacttaggcgggctttgggatttaattaatatgatggccaatacagcattcgtattcttaccagcacttgtcggttggtcagcaacgaagcgttttggtggtagtccaatactagggattgttatgggattaatgcttgtgcacccggccttattaaacgcttgggactatggaaaagcagcgactggtttagagggtcaaaagattgagtacttcaatattttaggactgttccaaattgagaaggtaggatatcaaggacaaattttacctgttttagtagcagcatttgtattaagtaaagtggaaattttcttaaagaaacatgtaccaaatgcaattcaattactagttgtaccaattacaacaatcgttgtgacaggtgtgttagcgttaggaattatcggtccggttacacgtcatattggagatttattaacagtaggattagtaggtgtatatgaaacagtaccagtagttggagcagtattatttggagcgttatatgcaccgctcgtaattacaggtatgcatcatatgtttattgcaattgatttacaattgattgcacaacatggcggtacatttatttggccgatgattgctctttctaacattgcgcaaggtagtgcggcacttgcgatgttctggatttctaaaaatcaaaatgataaaagtatggcatcaacatcagccatttcagcatacttcggtattacagaaccagcgatgtttggtgtgaatttacgaaataagttcccgttttatgcagcgattatagggtctgctgtggcagcgatattcattacattaaatggtgtattagcacctgctatcggaattgggggattgccagcatttatttctatcattccgaaatcgattccaatgtttattgtcggaatgattattgcagttgtaatcccatttactttaacatggttatttgcaaaaagagtgaaacagaagtaggaggaagttaaacatgaaggattggcataaaagtgtagtatatcaaatttatccgaagagctttaatagttattacaatagagaaaccggtgatataaaaggggttacagagaaactagattatttaaaagaactcggagtggattatatttggttaacaccgatataccaatcaccacaaaatgataatggatatgatgtaagtgattattacagcattgatccatcttacggaacgatggaagagtttgaagaacttttagcagaagcgaaagtacgtaacattgaaattatgcttgatattgttgtaaatcatagttcgactgaacataagtggtttaaagaagcgaaggaagataaaaatagtccatatcgtaattactatatttggcgtgatgaaaaaaataattggcagtctaagtttggtggatctgcttggaaatatgatgagaagacggagcaatattatttacatctatttgatgaaacacaagctgatttaaattgggaaaatgaaaaactgcgtgaagaagtatatgatatgatgcgcttttggctggataaaggggtaacgggattccgattagatgtcattaacttaatttcaaaagaccaatgttttttaaacgatgaaggtagtactgcgacaagtgatggacgcaagtattatacagatggcccgcgtgttcatgaatatttacaagagatgaaccgaaatgtttttgcaggaaaagatgtcattacagttggagaaatgtcatctacgacaattgataattgtattaaatattctaatcctgagcgtaatgaattaagcatgacgtttagtttccatcatttaaaagtagattatccgaatggtgataagtggacgaaagcagagtttgattttattaaattaaaagagattatgtctaactggcaaattgaaatgcaaaagggcggaggatggaatgcgttattttggtgtaatcatgaccagcctcgcatcgtgtcacgctttggtgatgatggaaagtaccgaaacgaatctgcaaaaatgttagcgacagccatgcacatgctgcaaggaacgccttatatttatcaaggggaagaaatcggtatgacgaatcctaaatttgagtccatcgagcaatatcgtgatgtagaatcgttaaatatatacgatataaagctaaaagaagggctatcaaaagaagagattatagggattttaaagcaaaaatctcgtgacaactctcgcactccgatgcagtggaatgaagagatgaacagtggttttacaacaagtacaccttggatttcagcggctgaaaattttaaagaaataaacgtagagaaggcattagaagataaagagtccgtattttatcattataaaaagttaatagagcttagaaaaacgtatgatgtaattacagaaggagaatatgctattttggataaaaatgatcctaaaatttgggcatatactcgtactaaagaaagtgaagtgctacttgttataaataacttctatggagaagaaataacgtattcagtaccagcgcacgttcagttagatggaatgaaacaagaagtactactgtcgaattataaagatgccagcaaggatattgcaaaacttaacttaagaccatatgaatcaattgtgtatcgatatacgaaataaaaaggttgtatgcccgagcggcatacaacctttttattttaagacaccactatacaaaatgcttacttctacttcaggtttgaattttacttttgcataatctttattccaattttttttcttccataagttaggatgataagcgataagatgtcttccaataccgaaagcatcacaatttgctttttgtagttttcgtgttatttttttcgcttctttcgtgagttgtttagaaagttctttatttagtttttctctatcgtccattgtatacatattatctcttggagattcaagtgctataacttttaattggagcttaatgtgagcataaacatttccttttttatctgttgttatttttaagtcgcgttttaattttcgattactaatttccattgttaaataatcagatgtcttctcagattcatcactagtcagtttttgggttatacgggcacttgttcccatttttccggttaataacacgaataaaacagattgttgcaaaggtaaatgcccagttaatttatcattgttaaataaagctaacccgtttgtaactacttcttttccttttatttttatagaaggaagggtaaagtctttaccgggatctaacatttttgtagcagctgtttctaaagtttcttttggaaatacactcatatcttctaagcttttcacttttttctttagaaaatctccaattagtaaatttcctattttctttttttcgagtatctccgatgtttcaccatctactgcaataagttttactaaagcagttgggtttgttggatctcgaaagctgacatctaaataggggagtatacccttttttagaattttggttccgagtaattgaacaccatatttaaaatagcgaatattcccagtcacatttttttttagggcatcgcctgtatccattatgttatgcccggttgctgaatatatttcattctcaaatgaagattgctctccgcttgaactttttacaagctcgattgtttgctggagtttattctcttccgtaatatcagctccaacgctataagctaaacttgcctcccttaatggttcttgatcccaacagccagaaaggagggaactagtacataatattaaaagtaatttaactctttttgggaacatactgttctcctttcttctttcttattattgaataaagtagaaataaaagagggaggacaacgatgaaaatataggtgaacttatcagtgaaagttgaaattacttttaattcttcaggtgtatctataaataaggctacactaaaagcaataataccaacgattggaacagcctttttatgattagcaaggttgaatatatgtccaattccgattgaagcagcgcagtaataactagcaatagaagcgacaactgttatcatccaaattgggatgaagattaggtccgttcgatctataattccaatatgcaaggagcgtaataagtaagcaactggctctggaataagctcaatttgctttggactaaatacgataaagcaaatccaaacggtaaaagtataaaaaagagttacaaatccattggcgatagaaatggccttcagttttgcaatagaactcccatttacttttgggaaagcgataagaataatttcaaaaccatacatggctgtaattgtttccttggatgcttgaattatattccaccatccggcttctgtaataggaaaaatataagagaaatcagctcgtgaaagccctagggcaattaaaagggccattggaataatgagaatagaggccatgacataaaatcgtacgatgactttaaatgtgttataagctacataacaacaagctactgtacataatatgagaattgcagaccacggagttgcgtgtaaaacccatactttaatgacgttacaagcattcaacataaccgtcataccgataagggtaaaataaaaaacataagaaaagcccaatagttttcctaacttattaccaaatagcatacaaacacttttatacatatctgcatcaggaaatcgttttaagaaaagccacataagtaaaataataagttgaatggcaagccccgcgatgagcgcagaaatccaaccaccaccttttgctatcggatgaagccggttaggtagagatagtataccgaccccaatttggcattgaataacgaaaaaggtaaattgaacaagtgaaattttactttgcgtgtttgtcaccgtcctcatcctctctcgttacatgttggcgctgcatttttttcggttttggatcatgtggtctttcccaaaatgaccaaattggtagtcttatgaaagaatctttcatatctttaatccgcatcggggcaacaggagaaagatatggtgtatgaaatgaatgaagctgacataagtgaacgaaagttataatgagaccgaatgatattcctacatatccgaatatggcagcaaggagcattaatggaaaacgaagaatccgaactgctgaactcatatcgtttgatggaacgagaaaagatgagattgcagttaaagctacaacgatgatcattgtgtaagaaacgagtccagcttttacaattgcatccccaattactaaaccacctacaataccgattgtttgtccaacgcggctcggcaagcgaataccagcttctcgtaataactcgaaaattaactccattaagagagcttcaaaaataggaggaagcggtactttctctaatgaagctttaatcgtatacacaagttcgagcggtaacacatcaggatgaaaagcaacagttgcaatatataaagctggtaagagaaaggcaattaaaaaacttactaagcgaatcattcggacgaaagaaccgacaatccaacggttattataatcatctggtgattgatagaaagcaaataacgtaacaggaacgatgagcgctgttggatctccatcagataaaatagcaacacgcccttccattaaattagcaacagttctatctggacgctctgtatttaattgctgcggaaatggggagaaagacgtatcctctataaattcttgtatgtatcctggtggcataagtgcatccgttttaatggtttccaatcttcttttcacttctataactaaatcgtcattcgctatattttgcatataagtaattgccactttcgtgtgcatttcttcaccgagtgtaaaatacttaacaactaaatttggactcttaatgagtttacgaatagaggttaaattagttgctagatcctctacaaaaccagtatgtggaccgcgcacaactccttcattatcaggctctgctatatctctctttaaagataaggttgtttcgaaaatacaaaaactgtcgacgtgttcatgaaaatataaggatttaccttgtaataaaagttgtatcccataatttaaattcgtttcttttttcatatttaacgtagaaaaagctttatctaaagataaagctgatcgcgttaataatggctcaaggactaactgatgaattagatttggatctgctaaagattcgatatataagattgctccttttccgttttgaaaagggagatctaatttttttatatcatcagaatgagaaagtttattttcaatgtaattaatgttctccggaagtgatggaaacatatgcttttggtttttactctcttgttgttctttttgctctgtcataatttccacctctcttaaagtgcaattgtttctgttaatttttgtcgtttgtgagaaatttatgcttgaattattttaaaaaaagaggattgaaggttacgttacattgtcttttgtgcattattcaatttcatagcagtacttctaacatttgtgtcgaattaagaagatatataggagggatacatatggaaatagctgtagaacgtgtttttacaaaagagattttaaaaagagcagcgagtttgtttcatgtaacagtggaagaaaagccacttggagattttgaaaattatatttttaaggcaaagggtgattgtggcgaagattacgtattgcgtttaactcactcttctcatcgctccaaaaaagaggtagaggctgaactagattttttacgatatgttgcggagaatggggcaaaggtagcaggacctctttattcaacgtctcaaaatcttgtagaagaaatcgtagcagaggatgaaactttctttttcgcttccttatttacatatgcaaaaggtgagcaagtaaaaggagaggaatcgccttattggggcgagcctctctttgaagcatggggaaaagcgattgggcaactgcatcgccttacaatggaatatcctaaaacagactatcgtgatacgtgggaagaagacgagagtgggattgttaatgaactagaagatgatcaagtgaaaaaaatcgctgcggtattaatggatgagataaaggctctttcaattgaaagagaaacgttcggccttatgcacggggatattcatccaggtaattttcattatgatggtaaagagttaacaatctttgattttgatgatgcagcttataattactttatacatgatttagcgatggttctttattactctgttctatttacaccgtggacagcagaagagaagacagattttgctcgtaaacagttacaagtgttacgaaaaggatatgagtatgagcacaggctggcggatagttggtatgaatcgttgccactatttttacgtttacgtgatataggtttatatggaacgcttcagaagaagtttaaagggaaagatatgcctgataacttcttgaaattatcagaagagctatacgaaagaattattaaaagagaagcaattgtgaatatataatacatttagttcaaaacaaagtatataaaacaaatatatactttgtttttttatacaaaaatatgtttactttattaaaataatattgtcctagattcggtatgcacttataattttatatatattctgaatattctttataaagaaggagggggaatgttgggaactttcgtaaattggttaaataatattgtttggagtccagcacttgtttatttatgtttaggagtaggtttatatttttctattcgaacgaagtttttacaagtaaggcacgtaggagaaatggtgaagctgacatttcaaggagaaaaatcagaggctggtgtttcttcattccaagcgttagcactttcgttatcaggacgtgttggaacagggaatatcgctggggtagcaacagcggttgcattcggtggaccaggagctgtattttggatgtgggcagtagcctttttaggggcaggatcagcttatgtagaatcaacactcgcgcaaatatataagacgaaacatcaagggcagtttcgtggtggacctgcttattacatcgaaaaaggtctaggagttaaatggtatgctttagtattcgttgcagcgacaattcttgcaacaggacttttactaccaggcgtacaagcaaatagtattgctgtaagtttagaaacggcttttggtattaatactaccgcatcaggggctatattagttgtcgtattagctcttatcattttcggtggagtaaagcgaattgttaacgtagcgcaagttgtcgtaccttttatggcaataggctatattttagtagcttgcgtcattgttgctatgaatattgaaaaattgccagaagcatttatgttaattataagaagtgcatttgcattagaagctgctttcggtggtattatcggtttagcaatctcttggggggtaaaacgtggtatttattccaatgaagcaggacaagggactggaccacacgcagcagcagcagccgaagtatcacatccagctaagcaaggtttagtgcaagcattttccgtttacattgatacattatttgtttgttcagcaacagcatttatgatgattattacaggcatgtataacgtatttgatgcaagcggaaaaaactttatcgttaataaactaaatggtgctcagccaggaccaggatatacacaggcggcggtagaatctgttttccctggatttggaaacggtttcgttgcaatctcgttattattcttcgcgtttacaacaattatggcgtattactacattgcagaaacgaatattgcgtacttaaatcgtgataaagaccgtccttggatgtctatggtactaaagtttgtatttttaggagctgtattctatggatgtataaaaacagcagcaacggcttgggctttaggcgacattggggtaggaattatggcatgggtaaatatcattgcgattttactattacaaaaacctgcattagtcgcattaaaggattatgaaaaacagaaaaaagaaggaaaagatccagtattcgatccaaggccattaggaattaaaaatgctgatttttgggagcatgaatacgggaaagataagaaagaagaagtatcttaacagaatagaaatgaagaagcaaaggggaaactctttgcttttttttatggacaaattgaagctaaaagttatttttgggactatttttgaatataaaaagaatgtacatgcattgttaggggaagggggagtatgttgatagaatttcgtaatgtaaataaatattatggtaactttcaagttttgaaaaatattaatgtgcaagtgaaaaaaggcgaagtggtagtagttgtcgggccttcaggatcaggaaaaagtacattgcttcgatgtataaatcaattagaggcaattacagatggagaattaattgtacaaaatacagaggtacacaataaaaaaacggacatgaatgaattgcggcgaaatattgggatggtctttcaacatttttatttatatccacataaaacggttcttcaaaatattacattagcaccgattaaagtaaataaagtttccaaagaagaagcagagaaaacagcaatgttttatttagagaaagtaggaatcccggagaaggctaacgtatatccacatcaattatccggaggacaacagcaacgggtggcaattgctagaggacttgcaatgcagccggaaattatgctattcgatgagcctacgtctgctcttgatccagagatgattggagaggtacttgatgttatgaaagcactggctaaagaagggatgacaatggtcgttgtcacgcatgaaatgggatttgctagagaggtagcagataggatcttatttatggatgatggtcaaattattgaagatacaacaccggcgcacttttttgtaaaccctgaacaagaaagagctcgtttatttttaagtcgggtgctaaatcattagaggaggaatttcatgcttaaaatgaaaaaattatttactttaatcgtattttcatgtttattcgtgcttgttgttgctggttgcggaagtaagaaagatgaggcaaaggaaacaaatacgaagcaaggcggggctgttgagcaaattaagaaacgagggaaattagtagttggggtgaagaatgatacgaatttatttggattaaaaaatccttcaacagggcaggtagaaggattcgatgttgatgtcgcgaaggcacttgcgaaaaagattcttggagatgaaaagaagctagagctgaaagaagtaacgtctaaaacacgtattccaatgctgaaaaatggtgatattgatgcaattattgcaacaatgacaattacggaagaacgcaaaaaagaagtggatttttcagatgtatattttaaagcaggacaatcgttacttgtgaaaaaaggaagcaatattaagagtgtcgatgatataaaacaaggcgttaaagtattagctgtaaaaggatcaacatctacaaataacattcgtcaaaagtcaccagaagcgactgtattagagtttgaaaattatagtgaggcatttacagcgttaaaggcaggtaaaggtgatgtgttaacgacagataatgcgatcctttacggaatggcaaaacaagattctaattatgaagtagtaggaaaaattttcacagatgaaccatacggaattgcagtgcaaaaaggggcagatgatttaacgaaagagattaatactttaattaaagacatgaaagcaagcggggagtatgacaaattatatgagaagtggattggacaaaaaccagaaaagtagatagtaaaagtgagaggatgagagtgctcatcctcttcttgtaaagaaagaggggagaatatgtgcctgatttttctatattaacgaataacattgatatgtatttagaaggatttaaatatacagttatgtctagtgtaattgcattgataggcagttttattttaggagtaattttggcagtaatgcgtattgcacctattcgtattttaaattggataggatcagcttttgtggagtttgtaagaaatattccactcgtattaattgcatttatattctattttgctttacctgtaataggaattactttaaatggttttgtagcaggaacagttacgcttacggtatatacggcagcttttattgcagaagtaattcgcgctggtattttatcagttgcgaaagggcaaatggaagctgcccgctcttcagggctaacgtatgtgcaggcgatgtattatgttgtcttaccccaagcagtgaaaattgtaattccccctttaggaaaccagtttctcaatttagttaaaaactcctcaatacttggaattattgctggtgctgatttaatgtatcaaggagatttaatttcaacgaagacgtttgttacgtttgatgtttatatatttgtcgggatgttttatttaatattaacaattccgctcagtatgctagtgcgttatttagaaaaacgcttggcaaaggaggcggtgtaaatggatttcaagggagcaattacaggagatcatattctatttttattaaaaggattacttataacattagaggtagcgctcatagcaattgtacttagttttattattggaagtgtaatcggtatattgcgctacacgaaaatacctgtcgtctcacaaatattaggagttatagttgaagtgattcgaaacttaccactactgttaattatatttttcacgtattttgcacttccagaagcaggcttgaaattagaaattataacagctgcaattgttgctttaacaatatttgaggcagcaatgatatctgaaattgttagaagtggtttattgtctattgaaaaagggcaggttgaagccgcaagatcttcgggattaacttatgtgcaagcgctttggcatattattttgccacaagcattaaggagaatggttccgccgcttgtcagtcaatttatttcattgctgaaggatacgtcgctagcggttgttatatcactccctgagcttatgcataatgctcaaattattagcgggcaaaatgtgaattacatgattccaacatttatattagtagcttgtatgtactttatcgtaaattatagtttatcaattttatcgagaagattagaacttcgttgactcttacaatatatgtaagggttttttccttgtttctccttattttcctctaaatagaatctaaatcttgcaataattcgatttttatattattttatcagaaaagttttaattttatatagaaaatgtaatcgctttcgtgtatatttttattatcagaaaattttaacaagatataggggtattggtagggggaggatttagatgcagcaaccaacgaatgagaaattacatcgtacgatgaagagtagacatttatttatgatcgcacttggtggtgtaatcggaactggtttcttcttaggttcaggttacaccattaatcaggctggaccagggggagccatcctttcatatttagtaggcggatttattatgtatttaacaatgctttgtcttggagagttaacggtagcaatgccagtttcaggttctttccaaaagtatgcaacgaagtttattggaccaggaacgggctttatgattggctggttatactggcttggctgggcagtaacagtgggtctagaattaacgtcaataggtttaatgatgaaaagatggtttccaaatgttgatgtttgggtatggtgccttgtattcggtgttattttatatgcttcaaacgcaatttcggcaaaaagttatgctgaattagaattttggttttctagtattaaagtagttaccattcttgcctttgttgttcttggtggtagtgcattattagggtttatatcatatgacggaaaagaagcagcacctcttttctctaactttgtaagcgatggtggattatttccgaatggactagctgccgtattacttacgatgattacagttaacttctcgttccaaggaacagagttaatcgggattgcagcgggagaaagtgaaaatccagaaaaaacaattccacgcgcgatccgtaatacagtatggcgcattatgttattcttcattttaacaatgacgattttagtagggttaatttcttggaaagaagctggcgtaattgaaagtccattcgtagtcgtatttgataaaatcggtattccgtatgcagctgatattatgaatttcgttattattacagcgttactatctgtagcgaattcaggattatatgcggcaactcgtatactatggtcacttgcaaatgaaggaatggcaccaaagtctttccaaaaagtaaataaacgtggtattccaattacagcgttagttgtaacaattgctgtagctgctttatctttattaacaagcttccttgcagaagatacagtatacatgtacttattatctatagctggtttatcagctgtttcaagttggatcattattgctttatcgcaacttcgctttagaagtcagtatataaaaggcggaggaaagttagaggacttaaagtatagaacaccactatacccaatcgttccaattttagctttaattacaaatagtatcgttgttattagtttagcgtttattccagaacaaagaatggcgttatactgtggtattccatttatcattttctgctatatatattattatattagtaagaaacggcagaaaccgatgaaagtggagatggaaaaaacaaatgaaactaacaatcaaacacgatgatatagaagcagatttatcgtatggtcaattagcgattggaaaagaaaacggttattcaccgttacaattactcgtttcttctatcgcagggtgtagtgcaattgtctttcgaacgattttagaaaagaaacgtattccatacgatacgtttacaatcgaaactgaaattggtagaagtgaagcgttatcgaagccagttgaaagtgttcatttgcactataaaattaaagcgcaaaatattacagaagagcagctggacaaggcgctgcaacttgcagtgaaaaattgtacgattgttcaatctgtaaaagatagtataaaggttacggaaacaattgaactaataaaatgaaacataaaaacgtgagaatacggctctcacgtttttatgtttttaataaagggggaaatatgatggaatgtttagggtgtaaattagcaggcggagaggaaattatatatataatatatgaagatgattatgtaacttgctttttagatcatgcgcctttctacccaggacatactttaattgtgccaaagcaacatgttgtagaagtagatgaattaaatgatgttgtagcaaaatccgttatggatgcttctaagcttattgcaaaagcgattaagatagtatataaacctgacggagttacagtttgtcaaaatggtggagtatttaacgagttaacacattatcatatgcatgtcgtaccaagatataaagagcgttcgtttgctgagttttatatggtacaaccaggagaaaagcagaatcataacttggaagagacacagaatttgttaaaagaagcgatagagcatatgctgcttactgaaaaggcgtagcggtcaggaaaattctaatattaaaaagcccaatttctcagttaaaatagagaaattgggcttttgtttattctattattaaattttatacataaaaagattttgcagtgtcacaaagtatagcgcttattcgttatatagagtgagaggaggaattatatgaaagttacaaacaacgattatgaaaagatggaagagctatatgagttgtatgaacaaaagatttattatgtagcgtattctattttaaataatattcaacaggctgaagatgcggttcaagagacgtttattactctttataagaacttggaaaagctccatagcttggctactcaagagcttaaacgctacattttgagggtcgcgaaaaacaaggcgattgatagttaccggaaaaacaaacgacatgaaacatttttagaagaatatgaaagagaatctgtagaagcagtagatgaaaatattgaagagtgggaaaaacgtaaaatgtctgaggttcaaattgatgcattgctaaaagagttaaacgaatctaatagacaggtgtttaagtacaaagtcttctataacttaacgtatcaagaaatttcaagtgtcatggggataaccgaggcaaatgtccgcaagcagtttgaacgcgctcgaaaacgagtccaaaatatgataggaggtatacaacatgacgaattcaaagaactccaaagaaatatatgaacttgctgaaaaaattgctttagatgattttgataaacttgaagaacaacatgaattttcacatacatatacgcgcaaaaagaaattgtttatggaggaaatgaagccgcaaaatggacaaccgctgaaaaagcgtaaaagacatcgtatgttaatcgctgctgcttgcttattgatcggcatgccgacaaccgtttttggagcagtaaaggtctataatatgattgttcaaaaacaaaattatgaagtaaatatttcagtaacaaataaggactcgaaaaaggctgataagtggtataagctgaaaatcgataaattaccagaaaatatggaagcaattgatgactctgctatgaaatattcctttaaagataactacgcaatgggtggattttcattcgttctttggagagtaggagggaattcagattttccaactctgtactcgaaaaattatgaagaaaaagagataaatggtaagaaggcagtaattgtccatagagaaaatggtaataaagatttaatgtttaatagagtaatttttctctattttgaggaagaaggaattatgttacaaagttatattggaaatgatataaacgaagaacaaatgatagatgtgctagggagcatttcacttgagcccacgtcaaaagaaaagtcatcatatataagcgattatgataaaaagtattttagccaagaaagtaaaacaactaaggtaattcctttgaagaaggatagcaaacgactatttcatataggacaaaaggttccagtaacgatatctatggataacagccaaattgaatatgtgatagaaaaagttgaagtttttgattcaatcaaagattttaaacaagagaactttaatgaacttggcctagagatattaagcaagaataaggctttagatcagacgggaaaattactatcatacagacgagatgaatataaattagggaatggtaaagattcaattgatacattagtagattcgaaattagttaatgttaaatttgtctacttaacaacaacagtgaaaaatattggcaaaaagtcgacagaagaaatctatatgcatccatccataaaacagcttaaatttgaagggaatgcatggaaatacgctaaagaagaggggatggacgcaacgcgtattatgacaggtgaagttgattatttagaacctcacggagatggaaaaagtttttacaatattggcagtatcacaccaggagaaacggtaaaagttaatttaggttattttgtagatgaagataaattagattcaatctttttggatgctttcaattacagagggattggtgacactgaaaatatgaattcgaaaaatcgttggtggtttgatattcgtcaataataaaacaataggaacaacaggacaaagaagctgcttatatttagcagcttttttcgtcttcatacatatgtaaaacttctttcgcacgcatacgtaaaccatctatcaattctgtcggttctaaaacttttgcatcttttccgagtctataaaataaaggggtaataaaattgatttctcctttatcaattgttgaatgtatatatcctgtcccgttttcgtttgttacaacgaattcttcaaggtaaggcacgcttttacattggcgtacgccttctggtgtcagtaaaacatgtaactgagtagggatgtgtactacgttagagttagaggaaaaccactcttctaaattcatgaatgtatcctcattttctttcgttgataatatagaaagaatacgatcgatgcgatacagtaatacttttttcctgtcatagtcataggacggtaagtaccatagcccgtcatgagcatatacaccgataggatgaacatgttttgtttttatccccgttttagattcgtattgaaagtgtaaatttttattttcaatagccgctgttaacacttcgtttaaaagtggtgtatcaattgttctctttggattccaaaaggcgatataagaacgtattttgtcaactttcgctttcgcatcatgttgtagggagctatatagtttatgtgtaacggaatttatttctgtgttaaaaggtaagtctctgtagtagcttaaagattgaaaggcaaaaaagatggagactgcttcttcttcggtaaataaaataggtggaattactctattcgttaatactttatatcctccgttgcgaccttgttcagcgtaaatgggtaatcccatatcacttaaatctaaaatgtatctatggacagtacgaacagaaatattaaattcatcagctatttcttgcgctgtaaatgcttttttcgcagaagcaaatataagaatatctaataagcgtttagcttttgacaaatgtatcaccttttttctttttaaacatgacataaattgtcgtgttttattgttagtatattgtttacagcataatgttatcaagatgagatgtaaggaggaaaaaatatgtcacgtgaaatagttttatttattgcggcgagcttagatggatatattgcgaaagaagatgatgatttacagtggttaatggaaaccgaaggggagggagataacggttatacagaaatgtacgaaacgattgatacaataattatgggaaaaagaacgtacaattatgtagtagagcatacagaaacattcccgtacttagataaaaaatgttatgttttttctaattcggaaaaaggttcaaacggaaacgtggagtttgtaaatgaagatgtagtagagtttacaaaaaggttaaaatcgcaagaaggatctaaaatatggatggtcggtggagggaatctactgagagaattctttaagaataatctaattgatgaatatgttgtcacgattacccctcacatattaggttctggagttccgttatttcaagataagaatccggaaattaatttaactttaacggatacgaaacgttttgggcaatttgtaaatttatattataaagtaaaatgataaagaaacacgactactgatggtagtcgtgtttctttatagatggcaatgaaatgataaagcaagacccgtaatcgacttcgctcgttacagtaatatttccgtcgtgtagttctacaatttcttttacgatagatagccctaaaccagttccgcctgtagatcgtgttcttgctttatctacacggtaaaagcggtcaaaaatgtgagggaggtcttcaggtggaataccttcgccttcatcttcaattgtaatggagatacgtttatgttcttctgtgatagaaatgtttatatgagaatgttcttttgaatgtctataagcgttatttaaaatgtttactataacttgttcaaatcgctgttcatctaagtttactagcagtgtaggaggacaagagaaagaaactttaatgcatctttctttatacatggcatttactttttcggctatgcgagttaggaatgtgtgtaaatgtacttcctttacttgaatagaaaagttatgttgttccatttgtgcaagtgaaaataaatcttgaactaagtttgtaatgtaatcagactcatcttttataattgataaatatcgcatacgttgttcagaaggggtgctttcttttgaagcaatgtcagcataacctcttacgtatgttaacggtgttcgtaattcgtgagcaacacttgctagaaattcacttcgctctgttttcatataatgtaaatcatttgcgagcgtttgaatagatgatgctagttcaccaatttcatcatttcgagtagtcgttaatgaaacggacaaatcgcctttactcattttttcagttgcatgtttcatgtgtaacaatggttttgttaataaacgtgataataggaaaattgtgatgactgtgagtagaaacgtgatggcgccagcaataatgaattgtttcgttaatccatttaccaacttttcaatggattctgttccaagaaacatatacacatacccttcatgttttccagctactatgataggactaactgtacatatataattagatgttttccagtgattttctataatcgctccgttatggtctgttcgagtctgcatgctactaatgtgattttttatagtcgtgtttatttcgttagatttagctagcacttctttatttgtatttgtaataacgacagttgtttcagcttcagattccattaatgctacgtgagagattgtttgcttatcataatatttttcaagtacatcacgatgactgtttccacgttttaataaagctgtcatttcttcatttactctagtgtttacgagactataatagagcaatacaaatagaacactttcaattaaaagtgtaacaattaaaaaataaaatccgaattgaattgaaattcgtttcatcgttttaccccttactgttcagtatcaatccatcgataacctactccatacacggtttttaaatgatgatcaatagggaaatttgcttttcgcaatttatcacgtaaattacgaatatgcgaatcgactgttcgatcttctgtatttgtatttaatccccaaattcgttcaatgagctgatcgcggcttaatacgtagttcacatgacgtaaaaataatccgagtaaagaaaattcaattggtgtgagaaggagctcttcattatggacagaaacgaagtgttttgtttcatcccatacaataccgtgatattggatttgtttatgttcatttgtacgtcttaaaacggcttcaattcttgcgaaaagttcttcttcatggaaaggtttcgttacgtaatcatcggctccaagttttaatccttgaacgacatctactgtttgatcacgagctgtaaccataataataggaatgttactaaaagatcggatttttttgcacgtttcccatccgtccatctttggcatcataatatcgagtaaaacaaatttaaagtttcgattttctatatgtaaaatagcttcttctcctgaagtcgcacatacgcagttatatccaattggtgtaagataaagcgttaataattcaagcattctcggttcatcgtctacgagcagtatatcaatcatagagagccctccatatttataatcgttacttaaagtgtaatgcaaaatcatgaagaaatggtgcagattatgatgcgtctgcataatttcttcagaattgcttgttattgtggagttgaaattacattttaggtaatcatattggctcaaaaatgattaatacggaggcggtatagtgaaaaaaatgacccgaatttttgggataacaataattacagcagttggtcttactgcatgcggacaaacgaatacagaccataaaaaccatgaatctacaaaagagaagaaaacagagcaaaaggaaatgaaaatgaatcaggaggtaacggcgccaaaagaaatgaacgaaggtgcatctaatgatttattaacgacaagtttaaaaaatgtaacgagattaaacacaaatgaccctttgcaaatggcagtattaacttcgcaaacgatatggccagcaactcataaggagaaccagccaggtgctgttattttagtaccagcaagcgagtggcaattaggtattgcgagtgcagatcttattcatcatccgaataacgggccgattttatttatagaaaaagaaaagataccggaaatgacgttaaaagaaataaaacgattaaatccaatcggaacgaaagatggaacacaaattatggtgatgggagatgtaggtactagcgcgcttgaacaattaaaaggttataaagtaaaacaaataaaagaaacggacccagctatatttgcgaaggatgttgataaggagtatgccgatataacaggaagctatccaaatagtgttattatcggttcgtctgcagaagaaggacgtttatatacaacccccgctgtaaattggatttctcatatgccggaaccactactctatacagaaaagaataaagtgccagaagcgacaatagaggcattaaaaatgagaaaagataaagcaaatatatatgtattagggccagaaaaaattgtttcaaaagaagtagaaaaagagctaagcaaatacgggaaagtaacgcgtattagtggagagacccctacagaaaactcgattgcgttcgctaaatttaaagatgaaaaaacaaaatttggctggggattcacaaaacctggtcacggtttatcatttgtttcaagtaaaacaccagatttagcagttgctggggcacctttttcacatatgggtaaacatgcacctgttgtattattagaagaaggtaaagcttcacaaccagtgtatgacttccttgcaagcattcagccgaagtttaaagatgatccaacacttgaaccatataatcacggtttcttattaggaagtacgagtgatatttcatttgaaacacaaggaatactagatgagaggttagaaattgtttaggaaagtggtcaaggacacggtggacattaataaaatgagcaaagacgctactgatatagcgtctttttctttaggaaacttttacatagtaaaaaatcttctactcgttatataatagccttcgtgcagtcggctagattttcttatggagaaaatcaaatgataaaggagtagaggagtggtattttgtttcaaacgataaaaaatgattggttttctaatgtgagaggggacgtgttatcaggaattgtcgttgctttagcattaatccctgaagcgatagccttctctgttattgcaggcgtggatccaacagttggactatacgcagccttttgtattgcagttaccatttcatttgttggcggaagaactgggatgatttcagctgcaacaggtgcaatggcattattaatggtaacgcttgttaaagatcatggtttcaatcggaacgtttgattggaactctgtaacaacaattcataaagtaccaaaaggaaaggcatttgttatgatcgtaacagttgtgattgtcctaattacacataatttagcattaggtgtaattatcggaacagtaattagtgcggtgttatttgcattcaatatggcaaagattcacgtgaaacatttatatattgaaaataagaaaatatacgaaattcacggtcaacttttctttgtagctacagccgatttcataaataatttttcatttaaagaagatgtaaaaggaattgaaatgaattttactcatgcgcacgtatgggatgattcagcagtggcatcaattgataaagttatcatgaagtatgaacaaagtggtgtgaaagtaactataacaggattaaatgaacgtagttcaaaacttgttgcaaatttagcgacttataataaaagaattgctagttaaaagcctcctttttagggggccttattatataatacgagtaggataacgaaaaggggattcagcatatgtacaaacaaattatattagcatgtgacggttctgaacatgcacttcgagcagcagagcatgcaacatatattgcgaaatgtagcgaagaaacaaatgttgaagttgtgtacgtagtagataatagaacggcaaaatcagatattatacaaggtcaaacagatttagaaacaatatcggctagtcgaaaagataaattaaaagagattgaaggtttattaaagaaagagaacatttcttatacaattacgatattacatggtgatcctggagatacaattgttcaatatgtaaatacaggagatatagatcttgtcattgctggaagtagagggctcaatacactgcaagaaatggtgcttgggagtgtaagtcataaaatagcaaaacgagtgaaatgtccggtgatgattataaaatgaaatagaatgtaacgaagaccttagtataactgaggtctttttttatgtataaatgactcttatttgtggaaatactagatatataagttgaaaagatgttaacttacaaatttgtaagttagttgttagagaaatcgatgttatgagatttttcccattggtaaaataaaagtatcaaaggggagatagggaggatggaagtaatgaaatcatttcaaaatttgtcatatagtcaaggggtaagcttaatttgtctagggggatttgctacatctgttacgttagctgttttaataaaggtgtttcatcaaatcttttaattttatagtagggaaggaattggttgttatcattagtaggaacagcaatgaaaataaaaaatagctcttagcatgtatgtaaatgctaagagctatttttatgcttgttatatgttatttaagcttgcttttgttttactgaccctgtatttaaagtaagagcaaggaagaacattgcaagtacgcaagatgcaagtaataagatgaatccgccatcccatccgaatgcatctacgataaagcccatagctgcactagcgaaagcagctccgcctaagtaaccgaagaatccagttaagcctgctgcagttccagcagctttctttggtgctaagtctagagcgtgtagaccaattaacataaccggtccgtaaattaaaaatccaattgcgacaagtgcgatactatcaaccattggattaccaggagggtttaaccagtaaacaagaactgcgataaatacaccgaccataaatagaataccagcaggtgcacgacgtcctttaaatagtttatcactcatccatccgcaaagaagtgtacctggaataccagcccattcatatagagcgtaagcagtacgtgagctactatgagtaaagcttttttcctctactaaataagtaggagcccagtctacaacgccgtaacgtacgaaatatacgaaaacgttcgcaatagcgatgtaccataaaaacttattgtttaatacgtatttaaataaaatttcctttactgaaagctcgcgttcgcggtcttttactttttcatctggtggatattctccagtatgttcttcaatagaaggtagtccacaagattgaggcgtatctttcatcgtaattaatacataaataccaactaaaattgaaagaatacctgggaagtaaaaaatacttttccagtcatctgcgaagaagtataagcctaatgttacaagtgaaggcataagcgctccgccaacattatgagcgacgttccaaatagacatttttgtaccacgttcgctaatagagaaccagtgaaccatcgtacgaccacaaggaggccatcccataccttgtacccatccatttaaaaactgaagtacaaacataagtataatgctcgttgtaatgaaagaaaatgagccgaaaataatattaatgatacctgataaaaatagcccagctgctaaaaagtagcgaggattacaacgatcggatacgatacccataagaaatttacttaatccgtaagcgatagaaactgctgaaaggataaccccaagttcccctttactaaagccttgctcgattaagtatggcattgctagtgaaaagttttttcgaacaaagtagtaacctgcataaccgatgaagatacctaagaatacttgtaaacgtaatttacggtattcgctatcaacgcgatcagctggtaagcgttccgcgtggggcgcaggtttaaataattgtgtgaaaaacataaaatgaaaatcctcccctaattaattcgaagcgttttaagacagagaacataaaaaggccatgaaatataaaaaagtttccttttttatgattcatagccgtgtactccgtttctccgtgactgtcaatattaacttcgtcgaaaattatacaactttgtgacaaaaatgtaaacgtttttatgaataaaagtattgacggattttgttcgtgggattaatatttaaatacattaaatattttattgtttaaataagaggtggataacatgccaaatgatatgacgcatatcgataaaattcaagctcttgccttttcgattggaaagaaaatgcagacggagttattagaacaaatgcaagcgacaggacttacaccaccgcagttttatattttaaagattttagatcattatggggcttcaagagcgacaacattagcaaaaaagatgtatgtgaagcctagcgcgattacagtgatgattgatcgtctaatcgatcaagaacttgtagaacgctatcacgacaaagatgaccgtcgcgttgtcatcatcgagttaacgaaaaaggggaaagctagagtagaagaggcaatgacagctcgtaacgagcatattgcaaaatacttttcacatttagagttgcaagaaagagaagatttattacgtctctttgagaagttagaaaccattatttgcgggacacaagagaaaaaagagaataactaagaggaattgaggagattacatggagcaacaagaaaatcaaaatagaaagttgttgttaatcggtttagtaatcgcgatgctatttgctgcattagatggaacaattgttggtacagcaatgccacgtatcgtcggtgacctaggcggattaagtttaatgacatggttaacgacagcttatatgttaacatcaacgacagttgtaccaattgcaggtaaattagcggatttacttggtcgtcgtaacgtatatataacagggctagttattttcatgattggttcggcgttatgtggtatggcgaatggtatgacagaattaattattttccgtggtattcaaggtcttggtggcggtattatgatgccaatggctatgattattattggagatatgttcacgggaaaagaacgtgcgaaatggcaaggtatttttggtgcgttatacggtcttgcttctgtaattggaccgcaagttggtggttggattgtagatgcagtgaattggagatgggtattctacattaacttaccggttggtattttagcaacaatctttattgcaatgggattaaaatcgcataaacaaacaggaccaattaaaattgatatcgctggaatctttacgatgattctcggtgttgtaagtttattacttgcgctaacgtttggcggaaaagattatgcatgggattcttggcaaattatcggtttatttgcactagctgtaattggtatcgttagctttgttatcgttgaaacgaaagctgaagagccaattttaccaatgcatttctttaaaaatcgcacatttacaatactgaatgcgattggattctttatgagtattggaatgttcggcgcgattatgttcgtaccattcttcatgcaaggtattgtaggagtaagtgctgctgaatcaggaacaattatgactccaatgatgattacaatgattgtgatgagtattatcggtgggcaacttgtattaaaagttggtgtaaaaccacaaattatcgcaggtatgcttattatggccggtggtttctggttattaacaacgatggatatgcacacaacgaagcttacagctacttcttatatgatggttatcggtttaggaatgggtcttgtaatgccgacattaacattagcgttacaagaaagcttcccgaaaaaagaccttggtgttgtaacatcatcaagtcagttcttccgacaaatcggtggtacatttggtattacaattttaggatcaattatgaataacacttcaggtacgacattaacaaagaatttagtacctgtattagatacattcccgaaagaagcgggacaaatggtaacgaaatttaaagatatgattcacacagatccacaaggtttatattcgatgctatttagcccagaggcattaaaacaaatgccagaagcgttcgctaacagtattgtacctattttgaaaaactctttagtagactcgcttcatactgtattcttaacaggattagtatttatcgtagtaggtgccatctttacgattttcttacaaaaaattaaattatcagatcgtaaaaaagatgctaaagagcctgttgtagaagaaaaagaaaaaactgtatcatactcgtaatgaagaagcatcgccttatggcggtgcttttttgagtataaccttaaaagctttttagtgagaaatgattgacgtatttttagaaatacgttatattattttctgtaaacggttacatgaaatgaggagaaaagagaatgagtacgatcaaagacgttgcgaaattagcgggagtatctgttgcgaccgtttccagagttctaaataaaaatggatatgttcacgaagatacattaaaaaaggtagaacgtgcaattgagatgttagattataagcctagtacagtagcgcgttcactgtataataaaaagtctcgtttaattggcttagttgttccaaatatcgtgaatccattctttccggaagttgcacgtgccgtagaagatgtagcacataaacaaggttacacagttgtcctttgtaactctgatgaaagtttagaaaaagagaaacaatatattgatgtgcttagacaaaataatgtagatggatttattgtagcaacgaatccacaaaatagtgttaattacatgaatgtatctgttccagttgttgcgattgaccgtatgtttaatgagcgtattcctactgtatatgcagataactatgcaggaagtcaggctgcgacaaagttgttactagataaaggatgtaaacatattgcacatattcgcggtccacgtgatgtgagtactgcaaatgaacgctttgaaggttttgtagacgttattacgcaaaataatctttcgtatatgattgcagagagtacgtttgatccagcaaatagtgagcttgtagcgatggaattattagaagaatacccgcatattgatggtattgttgctgggaatgatttaattgcgatcggtattgtaaaggctgcacttcaaaaggggattgtcattccaaatgatttacaaattatcggatttgatggcatttctttaacggaaatgatgtatccatctattacaacagttgcacaaccgatatatgaaatggggaaaattgcaacagagttgttgttagagcaaatggaaggaaatacattagaagagaaacattatcgtttgccgattgaaattatagaacgaaatacaacgaagtaaggagatgaaacagatgccaaatattgcagtagtagggagcatttcaatggacttagtggctgtttcaaaaaaacggccgaaagcaggagaaacagtaattggtgaagcgtttcatacaattccaggagggaaaggagcaaaccaagcagttgctgcagctagattaggagcaaatgtagcaatggttggagcggtaggaaatgatgattatggaacagtagttagaaaaaatctagagaacgaacgcatttttatcgattatgtggtaccggttacagatagaacgacaggaattgctcatatcgttttagcagaagaagataacagtattgttgtcgtacaaggggcaaatgctcttgtaaataagtcagttgtagatcgctccaaagaacttcttgtaaaagcggatatggttgttcttcaactagaaattccacttgaaacagtaaaatatgtattggctatttgtgaggaacataatattcctgttatgttaaatccagcgccagcacaagttttatcagaagacattttagaaaaggcaacttatattacgccaaatgaacatgagtgccgcatcgtattagatgatttcatctcaccaattgaagatttattggcgaagtatccaaataaattattgatgacagaaggttctaacggtgttcgtttccataatggcacggagattgtacatgttcctagcattgctgttgatgtagtggatacaactggagctggtgatacatttaatggtgcgttagcagttgcactttctgaaggagagacacttcaaaaagcaattcgtttcgcgaatattgccggtggtctttctgtaacgaaacttggggcgcaaggcggcatgccaacgagagataaagtacgtgaagtgcaggtgattgttggatgaagaaacacggcgtattaaacagtgagattgcatcaatccttgctttacttgggcatacggatacgattgtaattgctgattgcggtttaccaattcctgacggagtaaaaagaattgatttagctgttgaaattggaaaacctagctttttagatgtattgcaagtggtagctgatgatatggcaatcgaaaaagtgacgttagcagaagaagtcattataaataatgcggaagtaaataaagaaatagagcagaaattaatagagccagcatttgagtatgtatctcatgagcaatttaaagagcatacaaagaaagcgaaggcgattattcgtacaggcgaggctacgccttatgcaaatgtaattttacatgcaggcgtgattttttaataaagggaagtgatgggaatgcatattgaaatgaaaaacatttcaaaggcgttcaatggaaatcctgttttgaagaatgcacagtttatgattgaaacaggagaagtccatgcattgatgggggaaaatggagcgggtaaatcaacgctcatgaagattttaacaggtgtatacaaaaaagatggtgggacaatcacgatcgatgggcaagagcgcacctttaaaaatgcgaaagaagctgaagagtacggcatcgcatttatacatcaagaactaaacatattgccgaatttaacagtagctgaaaatatgtttctcggcaaagagttaatgtatgggaaaacaggtattttacgcactcgacaaatgaacgcgattgcgcagcagcaactagcggagttagggttgcatgtaagaggcgctatgttagcagaggaattatcggttggacaacagcaaattatcgaaattgcgaaagcattaatgacaaacgcgagcgttattattatggatgaacctactgcggcactgacggatcgtgaaatcgaaacgctctttacagtaatcaataagttacgtaaagaaggtgtttcattcgtgtacatttcgcatcgtatggaagagattttctcaatatgtgatgctattacgattttgcgtgatggagaattcgtcggaaagagattaattccagaaacatcatttgatgaagtagtgagtatgatggtggggcgcagcattggtgaacgttacccagagcgaaatagtcaaattggtgatgtcatttttgaaatgcgtaacggaacgaagaaagggaaatttgaaaatgtttcgtttcaagtgaggaaaggtgaaatccttggtgtagctggtttgatgggggctggtcgcactgatattatgaaagcgatatttggttatgaacctttagactctggacaaatttttataaatggacaagaagtaaagattgatagtccaatagatgcaattagacaaagaattgctttcattacagaagatagaaagtctgaaggattagtgttagatttttcaattcgagaaaatttagctttaccaaatttagaaagtctttcaaagggaagtgttctaagcaacgagctagaacaacagtttacggcggatatgatgaaacttcttaatgtgaaagcatctagcggagagcaggcagtgaaatctctttctggtggaaatcagcaaaaggttgtaatcgcaaaatggctaggcattcatccgcagttactcattttagatgaaccaacaaggggtgttgatgttggagcgaaaaaagaaatttactctattatgaataagcttacggagcaaggagatgccgttattatggtatcatctgagcttccagaagttttagggatgagtgatcgtgttcttgttattcatgaaggaaaagtaggcggaattttagggaaagatgaggcatcacaagagtctattatggcactagctacagggggagagtaaggatgactaagaaggggaatgtattacaacaactcggttctttaatcggtttagtattaattatcgtcgtaattacagctttaaatccagcgtttattgaaattccaaatttatttaatatactgcgtcaagtatcgattaatgcgcttattgcattcggaatgaccttcgtaattttaacagggggtattgacttatcggtaggttctattttagcattatcaagtgcacttgttgctggaatgatggcaagtggcatggatccgttccttgcaatggcagttggattattagcaggtcttgtaatgggaattgtaaacggtatcatcattgcgaaaggaaaagtagctccatttattgcaactttggcaacaatgactatttttcgtgggttgacgcttgtttatatggacggacgtccgatcactggtcttggtgatcatttaatgttccaaatgtttggccgcggttattttcttggtattccggtaccagctgttacaatgatgatcgctttcgcagtactgtacttcattttgaagaaaacgacatttggtcgccgtacatttgcaattggtggaaatgaagaagcagcagcactatcaggtattaatgttacgagaattaaagtaatgatttacggtctttccggaattttggcagcgcttgcaggtattgtcttaacatcacgattagattctgcacagccgactgcaggtacttcttatgaattagatgcaattgcagcagttgtattaggtggaacaagtctttctgggggaagaggatggattgttggtacattcatcggtgtacttattatcggtgtattaaataacggtttaaatttattaggtgtatcttctttcttccaacaagttgtaaaaggacttgtaatcttactagctgtattaattgatcgcagaaaagaagcgtaatggagggacagttcatgaagaaatggttacttatactcgttgcatgtattatggtcattactgctggttgttcaatggaaccgccagaatgggcaaaggattctagcgataaaggtcgaaataaaactattaaagttggattctctgtttcaactttaaataatcccttttttgtaactttgaaaaagggtgcagaaaagaaagcgaaagatagtggcatcgaattaattgctgttgatgcacaaaatgatgcagcaaagcaaacgaacgatgttgaagatttaattcaaaagggtgtcgatgtagttgttattaatccgaccgattcagatgctgttgcttcagcagtaagtgcggcaaatgcagcaaatgttcctgttattacagtagaccgcgttgcgaattcaggtaaggttgtttctcacattgcttctaacaatatcgaaggtggtcaaatggctagtgattacattcgtgaattagttggcgaaggagcaaacgttgctgagttagaaggaatccctggatcttccgctgctcgtgaacgtgggaaaggattccataacgtagccgataagtctttaaaagtagttgcaaaacaagcagctgattttgatagagcgaaaggattatctgttatggaaaacattttgcaagcaaatggtgatattaaagccgtgtttgcgcataacgatgagatggcattaggtgcacttgaagcattgaagtctgctggaaaaacagatgtagtcgttgttggatttgatgcaacagacgatgcagtgaaagcggttaacgatgggcgtatggctgcaacagttgctcaaaaaccggaattaatcggggagaaggcgatgcaaacagcaaaagagataacacaaggtaaaaaagtggacaaatctattccgattgaattagagcttattaagaaaaataaataaatataaaatgaaaattaggaaggaagaacaacaaatgaaattctttattgatacagcaaacgttaacgaaattaaagaggcaaatgaattaggtgtattagctggagtaacgacaaatccatcacttgtagcaaaagaaggcgtagacttccacgaacgcattcgtgaaatttgcaacgttgtagaaggacctgtaagtgcagaagtaattagcttagaagctgataagatgattgaagaaggaaaagaactagcgaagattgctccaaacgttgtagtaaaagttccaatgacaacagaaggtttaaaagcagtaaaagcgttctctgatttaggaattcgtacaaacgttacattagtgttctcagcagttcaagcattacttgcagctcgtgctggtgcaacatacgtttcaccattcttaggtcgcttagacgatatcggtcataacggtatggacttaattcgtcaaatcgcagaaatctttgcaattcatggcatcgaaacagaaatcattgcagcatctgtacgtcacagtgttcacgtaactgacgcagcattaaacggtgcacatattgcaacaatcccagcaaacgtaattgcttcattagtgaagcacccattaacagatcaaggaattgagaaattcttagctgattgggaaaaaacacaagagaaataatagaaaagcaagaatcctagtttaattgactaggattctttttttatttaaaagaattttcatgcaattttgcatattgtcttttaaatttgttatataagatatttaatatatatcacataactctttatttttcatatttcgacataaagtgaaactttaatcagtgggggctttgttcatccccccactgattattaattgaaccaagggataaaaagatagagggtctgaccagaaaactggagggcatgattctataacaaaaagcttaatgtttatagaattatgtctttttatatagggagggtagtaaacagagatttcgacaaaaacgcactaatttatctgaattttaagttttataaaaggggagaaatggaatgagaagaaaagcaccatttaaagtgttgtcatcattagcaattgcggcaattatcggatgtacatctgtaatgagtgctccgttagcatatgcagaaacggcagcaaaaaagaaagataatgtatctacaacaccaattgattacaatttaattcaagaagatcgtttagcggaagcacttaaagaaagaggaacaattaatccatcatcttctaaagaagagacgaaaaaagctgttgagcaatatattgaaaagaaacaaggagatcaggcgaataaagaaattcttccagatgctcactcacaagaaacgtctgatttcacaaaaaaagtaaaagagaaaaagatggaagaaaaggaaaatgtaaaaaaggctgaaaaaaatgttagccttgagcaaaagccagaaccaaataaaaatcaattgaatgggcaagttccaacttcaaaagcaaagcaagctccatataagggatctgttcgatcagataaagtattagtgctactcgttgaatttagtgattataaacataataatattgatcaaacaccaggttatatgtattcgaaagactttagtagagaacattatcaaaagatgttgttcggtaatgagccgtatactttatttgatggttcaaaagtaaaaacgtttaaacaatactatgaagagcagtctggtggtagttatacgacagatggatatgtaacggagtggctaactgttccaggaaaagcatctgattatggagctgatggtagcagtgggcacgataataaaggtccgaaaggtgcacgtgatttagtgaaagaagctttgcatgcagctgctgagaaaggactagatttatctcagtttgatcaatttgatagatatgatacaaacggggacgggaatcaaaatgaacctgacggtgtaattgatcatttaatggtaatccatgctggtgttggtcaagaagctggtggcggtaaattaggtgatgatgcgatctggtcacatcgttcaaaattagcagtagatccagtagcgattgaaggtacgaaatcaaaggtagattactttggtggtaaagtagcagcacatgattacacaattgaaccagaagatggagctgtaggtgtgtttgcacatgaatttggacatgatcttggattaccagatgaatatgacacgaaatatactggaaatggttcaccagtcgaagcttggtcattaatgagtggaggtagttggacagggaaaatcgcaggaacagagccgactagtttttcaccacaaaataaagacttcttacaaaagaatatgggtggcaactgggcaaaaatattagaagtagattacgataaaattaagagtggtgtgggagttcctacctatattgatcaaagtgttacgaaatcaaatcgtccaggcgttgtacgtgttaacttaccaggtaaaagtgttgaaacgattaaaccggagtttggaaagcatgcatattatagtacaagaggcgatgatatgcatacaacgttagagacaccattctttgatttaacaaagggaacaaatgcaaaattcgattataaagcaaattatgagttagaagcagagtgcgatttcgtcgaagtacatgcagtaacagaagatggaacgaagacgttaattgatagacttggagaaaaagtagtccaaggagataaagatacaacagatgggaaatggattgataaatcatatgatttaagtcaatttaaaggcaaaaaagtgaaactacaattcgactatattacagatccggctgtaacatataaaggttttgcgatggataatgtaaatgtaactgttgatggacaagttgtattttctgatgatgcagaaggacagtctaaaatgaatttaaatggttttgttgtttctgatgggacagagaagaaagctcattactactacttagaatggagaaactatgcgggatcagataatggattaaaagcaggaaaaggtccagtgtataatacaggtcttgtcgtttggtatgcagatgatagttttaaagataactgggttgggatgcatccaggtgaaggattccttggtgttgttgactctcatccagaagcgctagttggtaatttaaacgggaaaccagcatacggtaatacgggcatgcaaattgcagatgctgcattttcatttgataaaacaccagcatggagtgtaaattcattaacacgtggtcagtttaactattctggattacaaggtgttacaacttttgatgattcaaaagtatatagtaacaagcaaattgcagacgcaggaagaaaagttccaaaccttggacttaaattccaagttgttggacaggcagaagataaatcggcaggtgctgtttggattaaacgttaataacataaaagcacattcttcatatgaagagtgtgctttttaatttgtacagtaagttattattttagtttatgtaatacaagtttttattcatgtgtagtgtatcaaattatgtggggaaaggaaatatttccgaggaaattgtcgaagtatcgtcagtatttataaactttctgtttaaaagaagagatgtattattgcctttacggctcaatttatttacattgttatttggttatacacaaaagtaatatattcggcagtaaaagagcgctattggatagtgttctttttgtagatagaaaggagttgagttaaatgaaagaaataattgaatgtccacagtgtgaaggagagattactgcgcaacatattattgatctcccgcatcctttttcattcagatgtccacactgcaaggtgaggttaaaagaaatgagaatcacaccgtgcttaatattagcagcaatttgtatcattccactgtttattataattggagagagtattaaggaattactagtaaaatatttttctattatagatgatgtaccaactgtacttattttcttcttattttgttatccattgtattatttctatgaaaaatataatgctatattgtttattaaatacggcttattgaaagttaaaagttgaattgaataggagattatcataatgctttggaaaatatatttagttattgtagcaatgttagctattatttcgttagtaaggggcatgtttcaaacaccaattcaaaagtttgactttgtagtttctattattacgtggatagggctctttggttttgtatttgatatacaaatattaacctcaattgtttggaaatgtatcttcttgtttagcgtcatttggactttaactgcagtttttgtttttcgtttatatgaagagcgagatgagccgttaccttttatatttaaagtaattggaattattccaacgcttccattatattacggattatatcaatatgcatttaaaaaaagacaacgatggattatcccatcattgtcttttttactttgcttcttacataaatcatcccagcaaatgttaataaaaatgctgtcccgataatgaagctgatgctaggtgatgctccgattgcgccgactgtaaaggagccagcaacaactcctaatgagaagaaggcataaaataatccgaatgcctttccgcgattatcgtctgtagtattttcaacgagtaaagcgttaatagacgggaagaggattgcgaatccaattccataaatcatcattacgataaagagcataccttttgtagcaaataatccgagtaaagataatgcgaatgccataactgcaattccgattagcattagtttcgaacgattaaatcgatcgtaaatacgatttgttggaagcaagaagaagaggatagcagttataccaaatacacttaacatcatgcctgttgtggatgctttaagcgctaatgcctcaacttttactggtaacatataagtgacaattccttgtgaaaacattaatgtgaaagcaccaatatatgcttgtaataacggttctgattttaaaagttcaaccatatcttctttgttcatcatttgcgttcttgatgtatcttttcttgatacgttatttggtaagaagaatagagatacgatcgtaccaagagccattaaaatagaaatagtaatgaagacccattctacgccagctgttgctttcataataccgctgaaagccggtcctacgattgcggctgttccaacagcagcaccagatagagccattgcttttccttgtttttttgcagttgtttgttttgataaaaatgtaaaggcagcaggaattaaaaagccatcactaaatccatgcataaagcgaacaactaatagttgttcaccactttgaacaacggtgtataacaagactatgaaactcgtaattcccatgcttatataaaggattttttttgcaccaaatttatcgacagctgctccagcaataatattaccgatcatattagcgaatgagtacataccgacaactagcccgataataagaggggttcctccaaggctttgagcgaaagtactcataataggtaattgtgaaaatgtatctaaaaatgccacgataacgataaagtaaataaaatatttcaagcgatattcacctctcctatgctattatggcataatgctaatttcacctgcaatgaaattgaattaacagatgtggaaaaaagtacaaagtgacaaaatattgaacgttatttgtaaaaaattagtagagatgcgattgtttttttgaaatatatggatagaagtattataatagaattgtaaacttcaccaggttaagtatatacatagagagggatgtataaaatgaaagcactactttggcataatcaacgtgatgtacgagtagaagaagtaccagaaccaacagtaaaaccaggaacagtgaaaatcaaagttaaatggtgtggtatttgtgggacagacttgcatgaatatttagcagggcctatttttattccaacagaagaacatccattaacacatgtgaaagcacctgttattttaggtcatgagtttagtggtgaggtaatagagattggtgaaggagttacatctcataaagtgggagaccgcgttgttgtagaaccaatttattcttgtggtaaatgtgaagcttgtaaacatggacattacaatgtttgtgaacaacttgttttccacggtcttggcggagaaggcggcggtttctctgaatatacagtagtaccagaagatatggttcatcacattccagatgaaatgacgtatgaacaaggtgcgcttgtagaaccagcagcagtagcagttcatgcagtacgtcaaagtaaattaaaagaaggggaagctgtagcagtatttggttgcggtccaattggacttcttgttatccaagcagctaaagcagcaggagcgactcctgttattgcagttgaactttctaaagaacgtcaagagttagcgaaattagcaggtgcggattatgtattaaatccagcaactcaagatgtgttagctgaaattcgtaacttaacaaatggtttaggtgtaaatgttagctttgaagtaacaggtgttgaagttgtactacgacaagcgattgaaagtacaagcttcgaaggacaaactgtaattgttagtgtatgggaaaaagacgcaacaattactccaaataacttagtattaaaagaaaaagaagttattggtattttaggataccgtcacatcttcccagctgttattaaattaattagctctggtcaaattcaagcagagaaattaattacgaaaaaaattacagtcgatcaagttgttgaagaaggatttgaagcacttgtaaaagataaaacacaagtgaaaattcttgtttcacctaaataagatagaatcgaatagagtagcccttttctagaaatagaagagggctactttttttctatactgaaaggtgatagactttcctttgactaaatgtatttttgtttggaagggagaatctaatgctttcatttttgttaactttaaagcgaatgttaagagcctgtttacgagcgtggaaagataaagaatttcaagtattattcgtattaacaattttgactttaatatcgggtacgattttttatagtacagttgaagaattacgtcctattgacgctttatattttagtgtggtcacgttgacgactgtcggtgatgggaattttagtccgcaaactgatttcggaaagatatttacaatcttatacatatttattgggattggattagtgtttggatttattcataagttagcagttaatgtacaattgccaagtatattatcgaatagaaaaaaagagtaaagctggtcatctccctgtcaagtagacagaaataaaaagagtattatgccacggccttttcccgatattctatcggggaaaggccgtgaagtttttcttggaatcttataggttcgaggtggaagcatggtgacatgtggagctgacgaatactaatagatcgaggacttaaccatataatatgtagcaatgttatctagttttgaaggaatatgccttcatagtttggtgatgatggcagagaggtcacacccgttcccataccgaacacggaagttaagctctctagcgccgatggtagttgggaccttgtccctgtgagagtaggacgtcgccaagcaactaaacacgagtcaaatgactcgtgttttttcgtgttttcttttataatccatagtaattaaaaaaatgtgcttaaataattactattttgattaaatgcaggggaatgtggctaggatagtgaataagcaaaagagttgcaaattttattaatacgtatataattaaagtcaaagatagtcaaagtcaataaaggtggcggataaatgagaaatatatctgatatcattgagcaatatctaaagcaagttattgacttaagtaataataatgtgattgaaatcaaaagaaatgagattgcggatcgattcgagtgcgtaccatctcaaatcaattatgtaatcaatacccgttttacattagaaagaggatttgtagtagaaagtaaacgtggtggaggaggttacattcgcattataaaagtcaaactgcatgatgatatagacattattgatcaaatgcttcatatgattgatcatagcgttgcacaagggaatgcagagagtatgattatacgtttattagaagagggaatcataacaggccgtgaagcaaaactaatgttaagtgtactagatcgttctgtattatcaatggatattccttctcgagatgaacttagggctcgaatattatgcgcaatgttaagaacactgaaatataaataaatacagcttttgtaaaagaatgataattaagatagggcagttaaatattgtagaagttttgaaaaagagcatgtacttttatctaaatggattaaggaaagaggacaatctagtaatgtatgaaaagtatcatgaggtagatcgttcctgttgtaaaggtggggatattgatgacttgtcaaaactgtaatataagaccagcaactttacattatacaaaagtaatcaacgagaagaaggcggaagttcatctttgtgagcaatgtgcagagcaaagtggctatacgtctttctttcaatcatcacagtctaacttttcatttcatgatgtatttgctggtttattacacggtgaatcaacaatgtttggagaaggaaaaaacgggttttcaaatacaaatacaataagatgtccaggttgtaagatgacatacgaacattttacaaaggtgggacgccttggttgtgcttcttgttacgatacatttaaaggacacttaaacccattgttaaaacgacttcatggtggacatacagaacattgtggaaaaattccggaacgaatggaaggaaatatccacttaaagaaagaattagatgaactaaaacttattctgaaacaatatgtacagaatgaggagtttgagaaagctgctgaggtaagagatgaaattcgagggcttgaaactcagcttagtgagcatagagagggggagtagttctatgtcactggacaaaattatgaatgaagcgattagtccatggatgaagggggatggccctgattctgatattgttttaagtagtcgaattcgtttggctcgtaattttaagcaatatcaattttctactatgcaaaacgaagaggaagctcaaaaggttcaagaattatttaaaaagaaatttataaataaagcggtagagccctttgggaagtttggactattaaaaatgaatgaattaacgcctcttcaaaggagagttttagtcgaaaagcatttaattagtccaaatctagcagggactgaatatggagcatgtctgttatcagaaagcgaacacattagtgtgatgcttaatgaggaagaccacattaggattcagtgcctatttccaggactacagttatcaaaggcgcttcaaagcgccaatcaaatagataattggattgagaaagaggttgaatatgcttttgatgaatcacttggatatattacgagttgtcctactaacgttggtacaggattaagagcttctgtaatgattcatttaccagggctggttttaacaaaaagaattagccgtattatacaagtaattcaaaaattaggtttagtagtaagaggaatatacggtgaaggtagcgaagcgttaggtaatatatttcaagtatcaaatcaaatgacgctagggaaatccgaagaagatattattgcagatttaaagagtgtcatgcagcaaattatacaacaagaaaaattggccagagaattaattgtacaaaattcgagtattgagcttgaagataaggtttatcgttcttacggtatactagcaaatagtcgtttaattcaatctgcagaagcggcaacttgcttatcggatgtacgacttggtattgatctaggatatataaaaggtatatcgagaaatattttgactgagctaatggttcttacgcaaccaggtattttacaacaatacgcaggaggacctttaggaccagaagaaagagattatcgaagagcaaccttaatccgtgagcgattacgtattgaaaaaaactaagcgcaagtaggaggcgatttctatgatgtttggaagatttacagaaagagcacagaaagtattagctttatctcaagaggaagcaattcgcattgggcataataatattggaacagaacatattttacttgggcttgtacgcgaaggtgaaggaattgcagcaaaagcgttaattgctcttggattgagcccggagaaagtgcaaaaagaggtagaagcgttaattggacgtggaacagaagcttctcaaactgtacattatacacctcgtgctaaaaaagttattgaattgtctatggatgaagcgcgtaagctaggacattcttacgttggaacagaacatattttacttggcttaatccgtgaaggtgaaggtgtagcggcacgtgttttaaataatttaggcgtcagccttaacaaagcaagacaacaagtgttacaacttcttggaagtaacgaggcaagttcaggtcaccaaggtggttcatcgacaaatgccaatacaccgacactagacagtttagcgcgcgacttaacagttgttgcacgtgagaatcgtttggatcctgttattggacgtagtaaagaaattcaacgtgtaattgaagtgttaagccgtagaacaaaaaacaatccagtgttaattggagagcctggtgtaggtaaaacagcaattgctgaagggttagcacagcaaatcgtaaataatgaagttcctgaaacgttaagagataagcgtgttatgacactagatatgggaacagtggtagctgggacgaaatatcgtggtgagtttgaagatcgtttaaagaaagtaatggatgaaatacgtcaagcagggaatattattctatttattgatgaacttcatacattaatcggtgcaggtggagcagaaggtgcaatcgatgcatcaaatattttaaaaccatctttagcacgcggagaattacaatgtattggtgcgacaactttagatgagtatcgtaaatatattgaaaaggatgcagctttagagagacgtttccagccaattcatgttgatgagccgagtctagaagaatcaactcaaatcttgaaaggtttacgcgatcgttatgaggcccatcaccgtgtgtctattacagatgatgcaattgatgcagctgtgaaactttccgatcgttatattacggatcgtttcttaccagataaagcaattgatttaattgatgaagctgcttcaaaggttcgcttacgttcttatacaacaccaccaaacttaaaagagcttgaagtgaatcttgaggaaattcgaaaagaaaaagatgcggctgtacaaagtcaagagtttgaaaaggctgcttccttacgtgatatggaacaacgcttacgtgagaaattggaagatacaaagcgtcagtggaaagaacaacaaggaaaagaaaattcagaggttacggtagaagatattgcaaatgtcgtttctacatggacacgtatccctgtttctaaacttgcacaaacagagactgataaattattaaacttagaatccattcttcatgatcgtgtcatcggccaggatgaagcggtagtggctgtagcgaaagctgttcgtcgtgcaagagcaggactgaaagatccgaaacgtccaattggttcatttattttcttaggaccaacaggtgtaggtaaaacagaattagcaagagcattggcagaatctatgttcggtgatgaggatgcaatgattcgcattgatatgtctgagtatatggagaaacattcaacttctcgcttagttggttctcctccaggatatgttgggtatgaagaaggcggacaattaacagagaaggttcgtcgtaagccgtattcagttgtcctattagatgaagtagagaaggcgcatcctgatgtatttaatattttactacaggtattggaagatggtcgtttaactgattctaaaggacgtacagttgacttccgtaatacgattgttattatgacgtctaacgttggtgctgaggcgttaaaacgtaacaaacatcttggatttaacgtacaagatgaaagtcgtgattattcggatatgaaaggtaaagtaatggatgagctgaaaaaggcatttcgtccagaattcttaaaccgtattgatgaaattatcgtattccatatgcttgagaaaaaacatattcaagaaattgtgactcttatggtaaatcagttagtgaatcgcttaaaagaacaagaaattgaattgcaattaacagaaggggcgattgcagctattgctgataaagggtttgatcgtgaatatggtgctcgtccactacgtagagcaattcagaagcatgtagaagatagactatcggaagaacttttaaaaggtgctattgagaaaggacaaaaagttatctttgatgtagaaggggaaacatttgtcattcatagtgctgaaaaggtaaaataagtatagacaaactaagagggctacgagatagccctctttcttgtacgagaaggtcaaatgtttatagatgaaagcgaagtgaaatataaaaagatatggctaaaaagaaaacaaaattcacatgtcaagagtgtggttatcaatcaccaaaatatatgggtaaatgtccagggtgtggtcaatggaattcgcttgttgaagagatggaacccgttgtatcatccagacgcctaaattatgcaaatgcaattcaaacagaagtaacaaaaccaagacgtcttacagaagtagaaacaaagtctgaggcacgtattgaaacaaaatttcaggagtttaaccgtgtactaggtggcggaattgtagatggatctttagtacttattggtggggaccctgggattggaaaatcaacgttattattacagatttcctcgcaattagcagatgcttcatatgatgtattgtatatatcaggtgaggagtcagcaaagcagattaaacttcgtgcagatcgtttacatgtaaatggtagtaatctatttgttgtatcagagacagatttacagcgtattgcagcacatattgaagagatgaatcctgcttttgttgttattgattctattcaaacgatacatttacctgaggtgacatcagctcctggtagcgtggcgcaagtacgtgaatgtacagcagaattaatgaaacttgcaaaaacaaagggaatcccaattttcatcgtaggacatgtgacaaaagaaggtgcaattgcggggccgcgtatgttagaacatatggtcgatgcagttctttactttgaaggagatcgacaccatacatatcgtattttacgagctgtaaagaatcgttttggttctacgaatgaaatgggtatctttgaaatgaaagaacttggccttgcagaagtcttaaatccttctgaaattttccttgaggaaagaccagttggagttgcaggttcaacagtagttgcctcaatggaaggaacaagaccagttttagtagaaatacaggcattaatttcccctactagttttggaaatcctcgaagaatggcgacaggaattgatcataatcgtgtctcgcttattatggcggtactagagaaaagaacaggtttactattacaaaatcaagatgcgtatttaaaagtagctggtggtttgaaattagatgaaccggcaattgatttagctgttgccttaagtatagcttcaagttttagagataaatctacggcaccaactgatgcggtaataggagaagttggattaactggagaaataagaagagtatcaagaatcgaacaacgtgtacaagaagcagctaaattaggatttcaacgtgctatcattcctagaaaaaatttaggggggtggacaattccagaggggattgaggttgtaggtgtttctaatttaggagaagcgcttcgtttgacattaggaggctaggctatggaagaaaataagcaacgtgtcaaaagtataattaatattttacagctcgtggccccgggaacaccactgcgcgaagggatagataatgtacttcgtgcacaaacagggggactaattgttcttgggtataatgagcagattaaaagcattgttgatggtggttttcatattaattgcgcattctctcctgctagtttatatgaattagcaaaaatggatggagcacttattttaaatgaaactggaagtaaaattttaattgcaaacgcacagttagttccggattcatctattgattctattgaaacaggtatgcgtcaccgaacagcagagcgtgtagcaaagcagacgggcagccttgttgtggccatttcacaaagacgtaatgtaattacgctatatcaagggaacttacgttatacactaaaagatataggtgtcattttaacgaaggcaaatcaagcaattcaaacgctagaaaaatataaggctgtatggaatgacggcattacgaatttgggtattctagaatttgaagaggtcgttacaatgtccgaggtggttcacgttttacatagtgttgaaatggtgctgcgtataaaaaatgaaatattgagctatattcatgagctaggaacagaaggtaggttaattcgtttacagcttacagaattactagctgatttagaggcagaggcagcattgttaattaaagattatcaccaggagaaaacacaagaccatcatcaaatcttgaaaaagttacaagatcttgcaaatacacaacttttagaggatagtgatttagttaaattacttgggtatccaggacaaacaagtttagaagaaagtgtgacacctagagggtaccgaatcacaagcaagatttctcgtgttccgccacttattatcgagaatttaattaatcgatttaaaacattgcaaggtgtttgccgagcaactattaatgaattggatgatgtggaaggaattggagaagtgagagcgaagaaaatacgagaaggtctaaaaagaattcaagagcatctctatatgagtagacacaattaagaatattacattgattctataatataacgacactagaacatttttggtatatgatatgatatattggtaaataaaactatttacaaaaaaacacgtccgcttttgcattcggcgttttgattagcgaaacaatggttaataatgagtaggaggtggttggatgttaaaacggattgtacagctcttctttttagtgatcgggggagcgttagggatttacttaatcccaaaaattattaatgtattagatatcggtgcggttcctttgttggaaggatcgtatgttcgtgcaattattggtgcaattattttatttttaacaacattttggcttgtagattatattgttcaacttattaagcatattgaagaggctcttgtaaaggcgcctgtagcagatgttttatttggtacattaggattaatctctggtcttattgttgcatatttaattttgataccaattcgtgaatttacaattccagttattagtacggtgttgcaagtgttcttcacccttttacttggatatttaggattccaagtaggatttaaaaagaggaatgaattgctaggattatttacattaccccaacgcggaggtaagaagaaaaacaatagtgagaatgaagaggtagaggtcgaagcagaaaaatctacgactcattggaaaattctcgatacgagtgtaattattgacggacgtattgcagatatttgccaaacaaagtttttagaaggaacaattgtcattccgcaattcgtattagaagagcttcagcatattgccgattcttcagatgctttaaagcgtaatcgtggccgcagagggctagacattttaaatcgtattcaaaaggagatgccaattccggtagaaatttatgaaggcgatttcgatgatatccaagaagtagatagcaagcttgtaaagttggcaaaaatcactggtggaactgtagtaacaaacgatttcaatttaaacaaagtttctgaattacaaggggttacggtgttaaacattaatgatttagctaatgcgattaaaccagtcgtactccctggtgaagaattaagtgtttatgttgtgaaagatggtaaagaacaaaatcaaggtgttgcatacttagatgatggtacgatgattgtagtagaagatggtagagagtatgtgggttcacaacttgacgtacttgttactagcgtattacaaacatcggctggtcgtatgatttttgcaaaacgtaaattgctagaaaaagcattataagtagaggattattaatatgtatacattaattattccggcagcgggccaaggaaaacgaatgggtgctggtaaaaataagttatttttacttatagatgaagtaccaattattgtgcacacattgcgtgcttttgaaaaagataaagcgtgcaaaagtattattatggcaattaacgaagaagaacgcccgtattttgaagagttaatgcagaagtaccagattgaaaagcacgtacaatttattcagggtggagccgaaagacaagatagcgtatataacgcacttcagtatgcgagtggtgtcgaatatgttcttgtgcatgacggggcgcgcccgttcgtaacgaataaagtgattcgcgatgtattaattgcagcagaaaaatatggagcttccatttgtgcagtgccagtaaaagatactgttaagaaagtagagcagggtgttgttgtagaaacggtagagcgatctcaacttaacgctgtacaaacaccacaaggattctctgtttctcttttgctagaagctcatagaagcgcaaagcaaagttgttttcttggcacagatgatgcaagtctcgtagaacgtgttgggaagcaagtaggtgtagtagaggggagttactataatattaaagtgacgactccggaagatctattaattgctgaaagtttcctacgtgttcagaagaaataacgttgatgatgtgttaataaagaaaagctcggcaacagccgggcttttctttataaggatagcgatataatatagagtcataaagctcagtagtttagcttaaggaggaagtaaggatgtttcgaattggacaaggttttgatgtacatgaatttgcggaagggcgcccgttgattattggtggaattacaattccacacgagaaaggattaatcggtcattcagatgcagatgtattgttacatacgattgctgatgcatgtttaggtgcgattgcagcaggagatatcggaaagcactttcctgatacagacccagcttttaaagatgcagattcagctgtattgttacaaaaagtttgggaatttgtgcgtgaacaaggttacgagttaggaaatttagattgtacaattattgctcaacaaccaaaaatggcaccacatattgagagcatgcgtaagcgcattagtgaactgttagaaacgtctatcgataacattaatgtaaaggcaacaacaacagaaaaattaggatttacaggtagagaagaagggattgcttctcaagcggttgttttattacagaaaaaataatggtttttaattcgtaagatggataatcacatttttttggtgtacaattatagaatgtgttgacattaaggatggaaggtgtaccaattatggaaaagcaagtgagagtacgctacgcgccaagtccaacaggacacttacatatcggaaatgcgcgtacggcattatttaattatttatttgctcgtcatttagatggcaaatttattattcgtattgaagatactgatgtaaaacgtaacgtggctggtggagaagaaagccaattaaaatacttgaaatggctcggtatggactgggatgaaggtgttgatgttggtggtgaatttggaccatatcgccaaacagagcgtttagatatttataaaaaattatatgaagatttattagagcgtggtctagcttataaatgttatatgacagaagaagagctagaagcagagcgtgaaggacaaatcgctcgcggtgaaacacctcgttacgcaggtaaccaccgtgaattaactgaagaacaagtgaaagaatttgaagctgagggacgtattccaagtattcgtttccgtgtaccagctgatcgtgactacacattcaaagatattgtaaaagatgaagttgcgttccattcaaatgatttcggtgattttgttattgtgaaaaaagatggaattccaacttataactttgcagtagcagtagatgatcatctaatggaaattacacatgtacttcgtggtgatgatcatatttcaaatacaccgaaacaaatgatgatttatgaagctttcggctgggatattccacaattcggtcatatgactctaattgttaatgaaagtcgtaaaaagttaagtaagcgtgatgaatctattattcaatttattgagcaatataaagagcttgggtatcttccagaagcaatctttaactttattgcactactaggttggtctccggtaggagaagaagaaatcttctctaaagatgagtttatcaaaatgttcgatgcagctcgtttatcaaaatcacctgcattatttgattctcaaaaactaaaatggatgaacaaccagtatatgaaaaagcaagatttagatacggttgtagagttaagcttaccgcatttagtgaaagctggacgtgtgggagaaactttaagcgaacaagaccaagcttggattcgtgatgtaattgctttataccatgaacaaatgagttttggagctgaaattgtagagctttctgaaatgttctttaaagatcatgttgactatgaagaagaaggacaagaagtattaaatggtgaacaagtacctgaagtacttcgtgcatttgctggtcaaatagaagctctagaagcaatggagccagcagcaattaaggcagcgattaaagcagttcaaaaggaaacaggacataaaggtaaaaatttatttatgccaatccgtgttgcaactacaggacaaacgcatggtccagagcttccgaatgctattgcacttcttggaaaagaaaaagttttaaatcgtcttcaaaaagtaattggttaacattttctaggtttagaaatataataagtatacctaaaacctaataaggaaaagcgacgagaaggagaagtagaaaatcaggctttttacagagagaaccacctttaggctgggagtggtttataagcggatttttgaaatgccccttcgagtcttctgctgaacagcgaattgcttcgtgggatgtcttaggccgcaaagtaagcaggagcggtgtacaccgttatcatggatgagtttgaggcttttttaagcctaaacagagtggaaccgcgcttaaaaggcgtctctgtcaatatgacagagacgccttttttttataccgtgtaaataggtatgaatatagaatttatctccttatataaagaattaggggagaagtgatgagttaggggagttagttcgttcgacaaaaaagcagcccataaaggggagggaacaccgatgtttaagaggcttcgggaagatattgaagtcgtttttgaacaggatccagcggcaagaggttatttcgaagtcattttaacttactctggattacatgcagtttgggcccatcgaattgcacatgctttttataaaagaaattttttctttcttgcacgttttgtttcacaagtgagccgcttttttactggcattgagatccatccaggagcaactattggtcgacgcttttttatagatcatggaatgggagttgtaattggagaaacttgtgaaattggtgataatgtaacgatttatcaaggggttacattaggtggtacaggaaaagaaaaagggaagaggcacccaacaattcaggataatgtattaattgcgacgggtgctaaagttcttgggtctattactgtgggagagaattctaaaatcggagcagggtctgtcgtattaaaagaagttcctgcacattctacagttgtaggtatacctggccgtgtcgttattcaaaatggagtaaagattggtcaagaattaaatcactctgaccttccagatccgatttttgataaattaaaggctatggaagtagaacttgataaattgaagaaacaattggaattaaaggtagaaaggaaggataaaaatgactattcacatttataatacgttaacacgtcaaaaagaagagtttgttccattagaagaaaataaggtaaagatgtatgtatgcggacctacagtttataactacattcatattgggaatgcaagacctcctatggtattcgatacagtgcgtcgttatttagaatacaaaggatacgatgtgcaatatgtatctaactttacggacgtagatgataaattaattaaagcggcaaatgaattaggtgaagatgtaccaacgattgctgatcgttttgttgaagcgtactttgaagatgtaacagcactaggttgcaaacacgcaacagttcatcctcgtgtaacagaaaatatggatatcattattgaatttattcaagaacttgtgaataaagggtatgcatatgaatcagagggtgatgtgtactttaagacgaaggaattcgaaggttacggtaaattatcacatcaaccaatcgcagatttacgtcacggtgctcgtattgaggtaggggaaaagaaacaagaccctcttgattttgctttatggaaagctgcgaaagaaggagaaatcttctgggaaagcccttgggggcaaggacgtccaggatggcatattgaatgctcagcaatggcgcgtaagtatttaggggatacaattgacattcatgctggtgggcaagacttggcgttcccgcatcatgaaaatgaaattgcgcagtcagaggcattgactggaaaaacgtttgcacgttactggatgcataatggatatattaatattaacaatgagaagatgtctaaatcgctgggtaactttattttagttcacgatattattaagcaatacgacccgcagttaattagattctttatgttatcagtacactatcgtcacccgattaactttagtgaagagttattacaaagtacgaataatggactggaaagaattaaaacagcttatggaaacttaaagcatcgtatggagagtagtacggatttaacggaccataatgagaaatggttagctgaaatagagaaattccagactgcatttgaagaggcaatgaatgatgactttaacactgcaaatgcaattaccgaattatacaacgtagcaaatcatgcaaatcaatatttacttgaagagcatacatctaaagttgtgattgaagcatacgtaaaacaactggaaacgttatttgatattttaggattagaattatcaaaagaagaattactggataaagaaattgaagagcttatccaaaagcgcattgaagctcgtaaaaatcgcgatttcgcattgtctgatcaaattcgtgacgatttaaaagaacgtaatattattttagaagataccgctcaaggtacaagatggaaaagaggataaggatgattgatgcaaagcaattaaacagcttggcgttagcgtatatgggtgatgcggtatatgaacaatatatccgctatcacctccttcaaaaaggaaaagttcgccctaatcaattacatcgcttagggacgagctttgtttcagcaaaagcacaggcgaaagttgtttatcatttattagagacggcatttttgacagaggaagaagaggcggtattaagaagagggcgtaatgcaaattcaggtacagttccgaaaaatacggatgtacaaacatatcgacatagtacagcctttgaagcactaattggttatcatcatttattaaataatcgtgaaagattagacgaaattgtatataaggcaattgcagttttagaagaaaaggaagggggcacatcatcatgactagtgaatatattatcggacgtaaccctgtaattgaagcgttaagatcagggagagatattaataaaatttggatcgcagaaggtgctgccaaaggacaagtacaaattgtactagcgttagcgaaagaaaataagattattttacaacatgcaccaaagaaaaagttagatcaattagttgagggtaatcatcaaggtgtaattgctcaagtagctgcatatcagtatgcagagttagaagatttattcaaagtggcagaaaaacgtaatgaagatccgttcttcttgattttagatgagattgaagatccgcataatctaggttctattatgcgtactgctgatgcaacaggagctcatggaattattattccgaagagaagagctgtgggacttaccgcatcagttgcgaaagcatcaacaggagcgattgaatacattcctgttgcgcgcgtaacaaacttatctcgtacaattgatgaattaaaagagcgtggactttggattgctggtacagatgccaaagggaaaacggattaccgtaatttagatggtacaatgccgattggattagtaattggtagtgaaggaaaaggtatgagtcgtattattggtgaaaagtgtgatttcttaatcactctaccgatggttggtaaagttacatccttaaatgcttcagtagccgcaagtttgttaatgtatgaggtatatcgtaaacgtcacgaaattggtaaataaaaaatgaacgatattttaatcgttgacggctacaacattatcggagcttggggagatttgaagaaactgcgggatgtagatttacaatcatcaagagatgcgcttattgataagatggcggattatcaaggttatacaggcacaaaagtgatgatagtctttgatgcctatacagtccatggtattgaaaaaaagatgaaacaatctcgtgtagaagtaatattcacacgaaagaatcaaactgcagacgaaaagatagagcaacttgcgatagagcttagaaatataaatacacaaatatatgttgcgacttctgattatacagaacaatgggttatatttgggcaaggtgcccttcgaaaatctgcgcgtgaattagagttggaagtacaagcgatggaacaacaagtaagaaggcgtacaaaagacacgaaagaacagcagcccgccatgcgaaagatatttagtaaggatattacagaaaaattagaaaaattaagaagaggagagcgttgaagcattgacgctctttatctttttactgtataatattgctaaataaatagcggtcggagggatcaaggtggaagcaggcttcgtaagtataggcgacgttacatttcgtgatttagaggatgaggcaatcgttgagttagttcgaaaaggtaatactgacgctctagaatatttaattcacaagtataagaactttgttcgtgcgaaatcaagatcttactttttagtgggtgccgatcgagaagacattgttcaagaaggtatgatagggttgtttaaagcaattcgtgattataaagaggacaagctgtcttcattcaaagcatttgctgaactatgtatcactcgacaaattattaccgctattaaaacggcaacaagacaaaaacatattcctttaaattcgtatgtgtctttagataagccgatttacgatgaggaatctgatcgaacgttattggatgttatttctgaagcgaaggtgactgatcctgaagagatgatcattagccaggaagaatatacagacatagaatcaaaaatatctgaattattaagcgatttagaaaggaaagtgctttctttatatttagatggtcgttcttatcaagagatttcagaacagttaaacaggcatgtgaaatctattgataacgctttacaaagagtaaagaggaaattggaacgatatatggaaatgagagaaagtacaactttaaattcataagaagtaacaagtgctgcaggtgtaaaataaatcacctgttttcttttgtagagagtacaaaatgcatgtcattgacattgtcttttattgtatgatacatttttagggacataatgttacaaggttggtgtaactaatgaggaaaaaagttgtactctcatgtgaagagtgtaaaaatcgaaactactctactatgaaagatacgagctcaatagagcgacttgaaataaaaaagttttgtaaaacatgcaatcagcatacagttcacaaggaaacaaaataaataattgaaataatacactggaggtcccgcagatgcgtttaacgaactttttcggcgatgtaggtcgcgaaatgaaaaaagtaagttggcctaaaaaagatgaattactccgctcaacagcgactgttgttgctacagttgtgttctttgcgattttcttcgcagtagttgatatgggcatttcttctttaattcggttaattcttggttaattcttgaataagaagcacttatccatgatataatgttatttataagaactgtgtaaaagcccggtgaacgggttttttcatttgcgcaaaaaaatgtacgtcagggagggaaggacgctcgtcctaaatgaatggaaaaaagttggtatgttgtccatacttattctggatatgaaaataaagtaaaagcaaacctagagaaacgtgtagaatcaatgggtatgcaagataaaattttccgtgttgttgtcccggaagaagtagaagtagaaatgaaaaacggaaaagaaaaattaatgaaaagaaaagtgttcccaggttatgtattagtagaattaatcatgactgatgactcttggtatgttgtacgtaacacgccgggtgtaactgggttcgttggttcttctggttctggatctaaaccatcacctctattagaagaggaagttgttaccattatgaaacatatgggaatggacaacgaagtggttgatttcgactttgaacttcatgagacagtacgtgtaaatgaggggccattcgcagattatacaggtgctattgaagaaattgatgtggagaagaaaaaggttagcgtgcttgtggatatgtttggtcgcgagactccagttgaacttgacttccatcaaattgaaaaattataaaatgaaacttgaaatgaattgtaaaaagtgataatatcttttaagtcagtacgtcttcgttatcggagacgttttttgaaagattttatccttacagataaaatatgacgtgggagggcaaatcactgtccaattgaccacatcacggacttaaggaggtgtgtctcgtggctaaaaaggtaattaaaatggtaaagcttcaaattcctgcaggtaaagctaacccagctccaccagttggtccagcattaggacaagcaggtgttaacatcatgggcttctgtaaagagtttaacgctcgtacagcagatcaagctggtcttatcatccctgttgaaattacggtatttgaggaccgttcattcactttcattactaaaactcctcctgctgctgttcttcttaagaaagtagctggtattgagtctggttctggtgaaccaaaccgtaataaagtggcaactgttaagcgtgataaagtacgcgaaatcgctgaaactaaaatgcctgacctaaacgctgctagcgtagaagctgcaatgcgtatggttgaaggtactgcacgcagtatgggcatcgttatcgaagactaattcgatttgtttttaaaaaaggttgcgggtctggaattccaattcgcaacctttattatcgtaaatgattatcgtttttaaataaatggatggcgctcatcctcaggttatacctgaaaacaggcgtaaacgtgggaggttattccgctaaaaccacattcgaggaggaaataaaaatggctaaaagaggtaaaaagtacgtagaagctgcaaagcttgttgatcgtgcagctgcttactctgcaacagaagcagtagaattagtaaagaaaacaaacacagctaaatttgatgcaactgtagaagctgcattccgtttaggtgttgaccctaagaaagctgaccaacaaatccgtggtgcagttgttcttccacacggtactggtaaagtacaacgtgtattagtatttgctaaaggtgaaaaagctaaagaagctgaagctgctggagctgacttcgtaggcgatactgattacatcggtaaaatccaacaaggttggttcgatttcgatgtagtagtagcaactcctgacatgatgggtgaagttggtaaacttggtcgcgtattaggacctaaaggtttaatgccaaaccctaaaactggaacagttactttcgatgtaactaaagctgttaacgaaatcaaagctggtaaagttgaataccgcgttgataaagctggtaacatccacgttccaatcggtaaagtatctttcgaagatgctaaattagtagaaaacttcaaaacaattgctgacactttacaaaaagttaagccagctgctgcaaaaggtacttacatgaagaacgtaacagttgcttctacaatgggacctggcgtacgtgtagacgtttctacattagcgtaaattttggaagttgacttcataaagaagttttaatataatcatttatgttgtgaatttaattagtgtaccgtagacagtaggtgtcaatagacttaatttcctacctaggtgttaatatacgaagcggaatcttttttctgtgactatatgcctccatgtctacaagttgggcatggaggtttttagtgcactttcggtacatcttctatataatctacaggaggtgtaataacatgagcaaagtaatcgaaactaaacaacaagttgtaactgaaatcgcggacaaacttcgcgctagtaaatctacaatcgttgttgactaccgtggtttaacagtttctgaagcaacagaattacgtaagcaattacgtgaagctggcgttgagttcaaagtttacaaaaactctctaactcgtcgtgctgcagaatctgctgaaatggctgagttaaatgaattcttaacaggaccaaacgcaatcgcgttcagtaacgaggatgtagttgctcctgcgaaagtattaaacgacttcgctaaagatcatgaagctttagaaattaaagcgggcgtaatcgaaggtaaacttgtaacacttgatgaggttaaagcaatcgctactcttccatcacgtgaaggcttactttctatgcttcttagcgttcttcaagctccaatccgtaaccttgcacttgctactaaagcagttgcagaccaaaaggaagagcaaggcgcttaattttttaaaagataattacgtattatcgataaaacaatacaaacctatttaagggaggatatttacaatgactaaagaacaaatcattgaagcagttaaatctatgactgtattagaacttaacgacttagtaaaagctatcgaggaagaattcggcgtaactgctgctgctcctgtagctgttgctggtggcgctggagaagctgctgctgagaaaactgaatttgatgtggaactaactagcgctggtgcacaaaaaatcaaagttatcaaagttgttcgtgaaatcactggtcttggcttaaaagaagctaaagaattagttgacaacactccaaaagtaatcaaagaagctgctgctaaagaagaagctgaagaaatcaaagctaaacttgaagaagttggcgctgctgtagaagttaagtaattaacttttgatgctttaaaaaaagctcgctctcatgcgagcttttttttaactgtaaagaaaagaggtggccatatggcagaccattatttttctaacgacccttctagtaaaagtgatcgtaagcgatgggagtttgcccttcgtggatctcgattcactttcttatctgaccatggggtgttctcgaaaaacgaagtggactttggttcccgtcttttaattgaagcgtttcaaatgccagatattaaaggtgatatattagacgtaggttgcggatacggtcctattggtttgtcgttagcgaaagagtttcaaggtcgtgaagttcacatggtggatgtgaacgagagggcacttgggcttgcgaaagaaaacgccgctaataacaaaatcgagaatatacgtatttttcaaagtagcgtctatgaaaatgtagatggtaagtatgctgctattctatctaaccctccaattcgtgcgggtaaagatatcgtacatgagattttagaaaaagctgtggagtatttagttccagatggagagctttggattgttattcaaaagaaacaaggtgcaccgtctgcgctaaaaaaactagaagaagtattttctgaagttgaggttgtagaaaagaaaaaaggatattatatcataaaatcaaaaaaacgttgacggttatttttggctatgttaacattatacaatgccaatatatgattttctgcgttgagaaagatgtatatttttgtttctcttggaaaagatagtaaaatcagcagattatgaaacagaatgatggttttcttatagaagccatttttcttttttgagcaggtagaaagactcaacgtatttatctttaagagaaagagactacgctaatagcagtagttgtatttatttgtgattttgcacaaatttttttgtgcatttataatactcatgatttgaggggtgaagcagttgacaggtcaactagttcaatacggacgccaccgccaacgaagaagttatgcccgtattagtgaagtattagagttaccaaatcttatcgaaattcaaacctcttcttatcagtggtttcttgatgagggtttgcgagaaatgttccaagacatttctccgattgaagactttacgggaaatctatcgcttgaatttatcgactacagcttaggtgaacctaaatactctgtagacgaatgcaaagagcgtgatgtgacgtatgcagcaccacttcgtgtaaaagtgcgtctaatcaacaaggaaactggtgaagtaaaagaacaagatgtgttcatgggagatttcccactcatgacagagactggaacattcgtaattaacggtgcagaacgtgttatcgtttcccagttagttcgctctccaagcgtatactatagtggcaaagtggataaaaacggaaaacgtggttttactgctactgtaattccaaaccgcggagcttggttagagtatgagacagatgctaaggatgttgtatatgtgcgtattgaccgtacgcgtaaacttcctgtaactgttttgttacgcgcattagggtttggctctgatcaagaaatcaccgagcttttaggtgataacgaatacttaagcaacacattagaaaaagacaacacagatagcacagaaaaagcattgcttgaaatttatgagcgtctacgtcctggtgaaccaccaacagtagaaaatgctaagagcttacttgtgtctcgtttcttcgatccaaagcgctacgatttagcaaatgtaggtcgctataagatcaacaagaagttacacattaaaaacagattgtttaatcaacgtttagctgaaacattagtggatccagaaactggtgaaattttagcggcagaaggaacaatcttagatcgtcgtacacttgatcgcattttaccttacttagagaaaaacattggattcaaaacagcgaaaccaatgggtggagtggtagaaggcgatgttgagctgcaatctattaagatttatgctcctgagtcggaaggcgaacgcgtaattaatgtaattggtaatgcaaacattactcgtgatgtgaaacacatcacaccaggtgatatccttgcttctatcagttacttcttcaacctactatacaaagtaggggatacagatgatattgaccatttaggaaaccgtcgtctgcgttctgttggagaactattacaaaatcaattccgtatcggtctttctcgtatggaacgtgttgttcgtgagagaatgtcgatccaagatacaaatgcgattacaccacaggcactaattaatattcgtcctgttattgcatctattaaagagttcttcggaagttctcagttatctcagtttatggaccaaacaaatccattagcagagttaactcacaaacgaagactatctgcattaggacctggtggtttaacgcgtgagcgcgcaggctttgaagtgcgtgacgttcattactctcactacggtcgtatgtgtccgattgaaacaccagagggaccaaacatcggtttgattaactcattatcttcgttcgcgaaagtaaatgagtttggtttcattgaaacaccataccgtcgtgttgacccagaaactggtcttgtaacagggcatgttgattacttaacagcagatgaagaagataattatgttgtagcccaagcgaatatgaaattatctgacgaaggtgaattcctaagtgaagatatcgtagctcgtttccgtggtgaaaacattgtcacaaatagagaacgcatcgactacatggatgtatctccaaaacaagtagtgtcggcagcgacagcttgtattccgttcttagaaaacgatgactctaaccgcgcacttatgggagcgaacatgcaacgtcaggcggttccgttaatgaatccggaatctccgattgtaggtacaggtatggagtacgtatcagcaaaagactcaggtgctgcagtaatctgtaaacatcctggtgttgttgagcgcgtagaagcacgtgaagtttgggtacgtcgctatgtagaagttgacggtcaaacagtaaaaggcgacttagatcgctacaaaatgcaaaaattcattcgttctaaccaaggaacttgttacaaccaacgtccaatcgtaagtgttggaaatgaagttgtaaaaggtgaaatccttgcggatggtccttctatggaattaggtgaactagcacttggacgtaacgtgcttgttggcttcatgacttgggacggttataactacgaggatgcgatcatcatgagtgagcgccttgtaaaagatgatgtgtacacttctattcatattgaagaatatgaatcagaagctcgtgatacgaaacttggaccagaagaaattacacgtgacattccaaacgttggggaagacgcattacgtaaccttgacgagcgcggtatcattcgcgttggtgctgaagtaaaagatggagatttacttgttggtaaagtaacacctaaaggtgtaacagaattaacagctgaagaacgtctattacatgctatctttggagaaaaagcgcgtgaagtacgtgatacatcactacgtgtaccacacggtggtggcggtattatcttagacgtaaaagtattcaaccgtgaagatggcgatgaattgccaccaggcgtgaatcaacttgtacgtgcatatatcgttcaaaaacgtaaaatttctgaaggtgacaagatggccggacgtcacggtaacaaaggtgttatttctcgtattttaccagaagaagatatgccttacttaccagacggtacgccaatcgatatcatgttaaacccattaggggtaccatctcgtatgaatatcggtcaggtattagagcttcatcttggtatggcagcaagataccttggcattcacattgcaacaccagtattcgatggtgctcgtgaggaagatgtttggggcacaattgaagaagctggtatggcaaatgacgcgaaaacaatcctgtatgacggacgtactggtgaaccattcgataaccgcgtatctgttggtgtcatgtatatgattaaacttgcgcacatggttgacgataaacttcatgctcgttctactggaccatactcacttgtaacgcagcaacctcttggaggtaaagctcagttcggtggacagcgtttcggtgagatggaggtttgggcacttgaagcttacggtgctgcttatactcttcaagaaatcttaacagtgaagtctgatgatgttgttggacgtgttaagacttatgaagcaattgttaaaggcgaaaatgttccagaaccaggcgttcctgaatcattcaaagtattgattaaagagctgcaaagtttaggtatggacgttaaaatgatgtctagcgacgatacagaaattgaaatgcgtgatacagaagatgacgatgatcatcaatcagcagataaattgaatgtcgaagttgagacaactaaggaataattgggataacctgtagactaaaagggaggtaggccccttgatagatgtaaataactttgaatatatgaagattggacttgcttcacctgacaagattcgttcttggtcatacggtgaagttaagaaaccagaaactattaactatcgtacgttaaagcctgaaaaagatggcttgttctgtgagcgtattttcggaccacaaaaggactgggaatgtcattgcggaaaatacaaacgtgtacgttataaaggtgtagtttgtgatcgatgtggcgttgaagtaacgcgtgcaaaagtacgtcgtgaacgtatgggtcatatcgaattagctgctcctgtatctcatatttggtatttcaaaggtatcccgagccgcatgggacttgtcttagacatgtcccctcgcgcgcttgaagaagtaatttatttcgcttcttatgttgtaacagaaagtggagatacaccacttgataagaagcaattactttctgaaaaagaataccgtgcatatcgtgatcgatatggtagcacattccaagctgctatgggtgcagaagcaattaaaaagctactacaagacatcgatttagataaagaagtagacttcttaaaagaagaattaaaaacagcacaaggacaacgccgtactcgtgctattaaacgtctagaagtattagaagcattccgtaactctggaaatgaaccgtcttggatgatcttagatgttctaccagtaattccgccagaactacgcccaatggtacagttagacggtggacgttttgctacttctgacttaaacgacttataccgtcgtgtaattaaccgtaacaatcgtttaaaacgtctattggacttaggtgcaccaagcatcatcgttcaaaacgaaaaacgtatgttacaagaagctgtagacgcattaatcgataatggtcgtcgtggccgtccagttactggaccaggtaaccgtccattaaaatcactatctcacatgcttaaaggtaaacaaggacgtttccgtcaaaacttattaggtaaacgtgttgactactctggtcgttctgtaatcgttgtaggaccgaacttaaagatgtatcaatgtggattaccaaaagaaatggcgcttgaactgttcaaacctttcgtaatgaaagagttagttgaaaaaggattagcacataacattaagagtgcgaaacgtaaaatcgagcgtgtacaacctgaagtttgggacgttttagagtctgtgattaaagaacatccagtacttctaaaccgcgcaccaacacttcaccgtcttggtatccaggcgtttgaacctacattagtagaaggtcgcgcaatccgtcttcacccacttgtatgtactgcatacaacgcggactttgacggtgaccaaatggccgttcacgtacctttatcatcagaagctcaagctgaagctcgtcttcttatgttagcggcacaaaacatcttgaacccgaaagacggtaaaccagttgttactccatctcaggatatggtattaggtaactattacttaacacttgagcgtgaaggtgcaatcggtgaaggtatggtcttcaaagatgcaaacgaagcattgcttgcatatcaaaatggatatgttcatcttcatacacgtgttgcagtagctgcaagtgcagtaaacaacgcaacatttactgaagagcaaaagagtatgcttctattaacaacagttggtaaattaatatttaacgaaatcttaccagagtcgttcccttatattaatgaaccaacaaattcaaaccttgaaaaagaaacaccagcgaaatattttgttgaaaaaggtgcgaacattaaagaaattattgctagtcgcgaagaagtggcgccatttagcaagaaaatccttggtaacatcattgcggaagtattcaaacgtttccaaattacagaaacgtctcgcatgcttgaccgtatgaaaaacttaggattcaagtactctacaaaagctggtattacagttggggtatctgacattcttgtattaggcgaaaaagatgaaattctccacgaagcacaagcaaaagtagataatgtaattaaacaattccgtcgcggtttaatcacggaagaagaacgttacgatcgcgttatctctatttggagtaatgcaaaagatgttatccaaggaaaactgatgaaatccttgaataaacgcaacccaatcttcatgatgagtgactcaggtgcccgtggtaacgcatctaactttactcagcttgctggtatgcgtggtcttatggccaatccatctggtcgtatcatcgaacttccaatcaaatcgagtttccgtgaaggtttaacagtacttgagtacttcatctctacgcacggtgcgcgtaaaggtcttgctgatacagcacttaaaactgccgattctggttacttaacacgtcgtcttgttgacgttgcacaagatgtaatcgttcgtgaagatgattgtggaacagatcgcggtttattaatcggtgcgattaaagagggtaatgaagttatcgagtcattatatgatcgtcttgttggacgttttgcaagaaaaactgtaaaacatcctgaaacaggtgaagtattagttgctgaaaatcaattaattactgaagatatcgctcatatcgttgaaaattcgggtgttgaaactgtaaacattcgttcagcgtttacgtgtaacactcgccacggtgtatgtaagaagtgttacggtcgtaacttagcaactggaacagacgtagaagtaggagaagcggtaggtattatcgcagctcaatctatcggtgagccaggtacacagttaacgatgcgtacattccatacaggtggggttgccggagatgatatcactcaaggtttacctcgtatccaagagatcttcgaagctcgtaatccgaaaggtcaggcagttatcagtgaaatcgacggtgttatcgcagcgatcaacgacgttaaagatcgccaagaagtagttgtacagggtgaagttgaagctcgtacgtatgctattccttacggtgctcgtctgaaagtaactccaggacagccaattagccacggtaaagagttaacagaaggttctattgatccgaaagaattactaaaagtaacggacattacggcggttcaagaatacttattacgtgaagttcaaaaagtataccgtatgcaaggggtagaaattggtgacaaacacgtagaagtaatggtacgtcaaatgttacgtaaagttcgtgtaagtgatgcaggtgaaacagatgtattaccaggaacattactagatatccatcagttcactgatgcgaatgctaaggtcttactgcaaggtaagcaaccagcaacagctagacctgttctacttggtattacaaaagcttcacttgaaacagattcattcttatctgcagcatcgttccaagaaacaactcgtgtcttaactgatgcagcaattaagggtaaacgcgatgaacttctaggattaaaagaaaatgttattatcggtaaacttgttcctgctggaacaggtatgaatcgttatcgcaaagtggatcttgtaaaaacaacacaagatgacatgaatgtagaaaacgatgaggtttatgtggaacagtaaaattttccggcataaattttgtataaaaacaattaatcttagttgacattgtatgagtcaaaatgttactataatcaaggttgctcctgaacgatgctttggaggatatttatatgtcttatcaaaaagtatcaactgctgaaaatgtagtcgttggtcataaacgcacattggaggcaatcaaaaatggtacagttaaagaagttgtcatcgcagaggatgctgacatgcggttaacccatgctatcattcgtgttgcaatgcaatataacgtgcccataacaaaagttgaatcagttcgtaagcttggtaaagcttcggggattcaagtgggagcttcagcaataggaataataagttaaaactgtttttgtgaggagagagcatttgctcttccttgcaaaaactttgttttcaactaataatgaaccacctggatatgtggtcatacaaacatgcgaagggaggataatcaaatgcctactattaaccaattagtgagaaatggtcgtactgataaagtatggaaatctaaatcacctgcgttaaacaaaggttttaactctttaaagaaaaaatcaactgatatctctgcacctcaaaaacgtggtgtatgtactcgtgttggtacaatgactccaaagaaacctaactcagcgttacgtaaatacgctcgtgtacgtttaacaaacggtatcgaggttacagcttacatcccaggtatcggtcataacctacaagagcatagcgtagtattaattcgcggtggtcgtgtaaaggatttaccgggggtacgttaccacatcgttcgtggtgcgcttgacacagctggtgttgacaaacgtatgcaaggacgttctaaatatggtactaagagaccaaaacctgctaaaaaataataactttaaaatgaaaggaggaactcaatatgcctcgtaaaggacctgttgcgaaacgtgacgtgttaccagatccaatgtacaattcgaagctagtaacacgccttatcaacaaaatgatggttgacggtaaaaaaggtaaatctcaaacaattctttataatgcgttcgatatcgtaaacgaacgtactggtaaagagccaatggaagtattcgagcaagctcttaagaacatcatgcctgttcttgaagtacgcgctcgtcgtgttggtggtgctaactaccaagttccagttgaggttcgtccagaacgccgtacaactttaggtcttcgttggttagtaaactacgctcgtcttcgtggtgaaaaaactatggaagagcgtcttgctaacgaaatcttagatgcagctaacaacgctggtgcatctgttaagaaacgtgaagacactcataaaatggcagaagctaacaaagcatttgctcattaccgttggtaggattcaacgtaaaataaatgtaagcataaaccgctttatttgtcgcttatggaagtgtggagagggagaatgcctctccctttcatcgggcgctcgttttacataatgagagtactggacatactgacatgtgtaacaatataaagtggcttttttgctacttaaaataaaaaaatccaatccatatatggaaggagcaagacaccaaatggcaagagagttctctttagaaaacactcgtaatattggtatcatggctcacatcgatgctggtaaaacaacagcaactgagcgtattctgtactacacaggacgtattcataaaatcggtgaaactcacgaaggtgcatctcagatggactggatggagcaagagcaagagcgtggtatcacaattacttctgctgcaactacagcacaatggaaaggtcatcgtgtaaacatcattgatactccaggacacgtagatttcacagtagaagtagaacgttctttacgcgtacttgatggcgctgtagcagtacttgatgcgcaatctggtgtagaaccacaaacagaaactgtttggcgtcaggctactacttacggcgtacctcgtatcgtattcgttaacaaaatggataagatcggtgcagatttcttatactctgtaggaacaatccacgatcgtttacaagcaaacgcacatccaattcagttaccaatcggtgctgaagatgagttcaatggtatcattgaccttgttgaagagtgtgcttacatgtacggtaacgatttaggaacagacattcaacgtgttgaaattcctgaagagcacaaagaattagctgaagaataccgtggaaaacttattgaagcggtagctgagcttgatgaagaaatgatgatgaagtacctagaaggtgaagaaatcactgtagaagagcttaaagctggtatccgtaaggctacaacttctgtagaattcttcccagtaatctgtggttctgcattcaaaaacaaaggtgttcaaattctgttagacgcagttatcgactaccttccatctccactagatgtacctgctattaaaggtactctaccggatacagatgaagaagtagaacgtaagtctagcgatgaagaaccattcgcagctttagcattcaaaatcatgactgacccttatgttggtaagttaacgttcttccgtgtgtactctggtgtgttaaactctggatcatacgtgaaaaactcaactaaaggtaagcgtgagcgtgtaggtcgtatcctacaaatgcacgctaacagccgtgaagagatttcaacagtttacgctggtgatatcgctgctgctgtaggtttaaaagatactactactggtgatactctttgtgacgagaagagccttgttatccttgagtctatggaattcccagagccagttatctctgtagctatcgaaccaaaatctaaagctgaccaagataaaatgggtacagcattatctaagctttctgaagaagatccaacattccgtgctcacactgaccaagaaactggccaaactatcatcgctggtatgggtgaacttcaccttgatatcatcgttgaccgtatgcgtcgtgaattcaaagtggaagcaaacgttggtgctcctcaggtagcataccgtgagactttccgcgctgctgcgaaagttgaaggtaagttcgctcgtcaatctggtggtcgtggacaattcggtcacgtttggattgagtttgaacctaacgaagaaggtaaaggattcgaattcgaaaacaagatcgtcggtggtgtagttcctcgtgaatacatcccagctgttggagcaggtcttgaagatgcacttaaaaatggtgtactagctggttatccactagttgacattaaagctgcattagttgacggatcttaccatgatgtcgattcatctgagatggcgttcaaaatcgctgcatctatggcacttaaagctgcggtttctaaatgtagcccagtaattcttgagccaatgatgaaagttgaagttgtaattcctgaagagtacatgggtgacattatgggtgacgtaacatctcgtcgtggacgtgtagaaggtatggaagctcgcggtaacgcacaagttgttcgcgctatggttccactttctgaaatgttcggttatgcaacgtcattacgttctaacactcaaggacgcggaacattctctatggtgtttgaccactatgaagaagtaccaaagtctgtttctgaagaaattatcaaaaaaaataaaggtgaataattgatttttatcgattgttcaagtataactacttatgtaagcttagaaagtgggacgtaagtttcactttctagtctaaatataaaataacctatataaactaaggaggaatttagaatggctaaagctaaattcgaacgttctaaaccccatgttaacatcggtacaatcggccacgttgaccatggtaaaactacattaactgctgcgatcactacagttcttgcaaaagctggtggtgctgaagcacgcggatacgatcaaatcgatgctgctccagaagaaagagagcgcggtatcacaatctcaactgcacacgttgagtacgaaactgaaactcgtcactatgcacacgttgactgcccaggtcacgctgactatgttaaaaacatgatcactggtgctgctcaaatggacggcggtatcttagtagtatctgctgctgatggcccaatgcctcaaacacgtgagcacatccttctttctcgtcaagtaggtgttccttacatcgttgtattcttaaacaaatgcgacatggtagatgacgaagaattattagaattagtagaaatggaagttcgcgacctattatctgaatacggattcccaggcgacgacattcctgtaatcaaaggttctgctcttaaagctcttcaaggagaagctgattgggaagcaaaaatcattgaattaatggctgaagttgatgcttacatcccaactccagaacgtgaaactgacaaaccattcttaatgcctgtagaggacgtattctctatcacaggtcgtggtacagttgctactggtcgtgttgagcgcggtatcgttaaagttggtgacgtagtagaaatcatcggtcttgctgaagaaaatgcttctacaactgtaactggtgtagagatgttccgtaaacttcttgaccaagctcaagctggagacaacatcggtgctttacttcgtggggttgctcgtgaagacatccaacgtggacaagtacttgcaaaaagcggttctgtaaaagctcacgctaaattcaaagctgaagttttcgtattatctaaagaagaaggtggacgtcacactccattcttcgctaactaccgtcctcagttctacttccgtacaactgacgtaactggtatcatccaattaccagaaggtactgaaatggtaatgcctggtgacaacatcgaaatgactatcgaacttatcgctccaatcgctatcgaagagggaactaaattctctattcgtgaaggtggacgtacagtaggttacggtgtagttgctactatcgttgagtaatcttaactgatataaaaaaacctaagggattttcccttaggttttttgtttgcgtttatataagggataagagagtgtttttttgttttgacgagtttcttctatagtaatataaaaacaataaaagataatccagaaactgtaaaatgaattctgttagatgaaaacttgaaattctttaaagtgccatgtataatagcaaaagtagagaaaagcagatgcaaacaaaaagatgcttgcatctagacgaataacattgtataatagacaatgttggtctttgactgcgatgaagtggaaggttgctgacacacccggccgctttgccatggcatggtgtggggaaatttccatggagaaggtctattttagaaataggcgaacgaaggagggaaaataatggcaaaagaaaaaattcgtatccgtttaaaagcttacgatcaccgtattcttgatcagtcagctgagaaaattgtagaaacagctaagcgttctggggcaacagtttctggtccgatcccattaccaactgaaaaaactgtttacacaattcttcgtgctgttcataagtacaaagattctcgtgagcaattcgaaatgcgcacgcacaaacgtctaatcgacatcgtgagtcctactccacaaacagtagattcattaatgcgtttagacttaccatctggtgtagatatcgaaatcaaactataatttatataacttaaaaatgtaggaggtgtaactcatgaccaaaggaatcttaggaagaaagatcggtatgactcaagtatttgctgagaacggtgagttaatcccagtaacagttatcgctgctaatccaaacgttgttcttcaaaagaaaacaactgaaactgatggctacaatgcaattcagttaggatttgaagataaacgtgaaaagttaactaacaaacctgaacaaggccacactgctaaagcatctacaactcctaagcgcttcattcgcgaaatccgcgatgcagacgtggacggattagaggttggtcaagaggtaaaagttgacgtattcgctacaggtgaaatcgttgatgtaacaggaatttctaaaggtaaaggtttccaaggtgttatcaaacgccacggacaatctcgcggacctatgtctcatggttctcgctatcaccgtcgtccaggttcaatgggcccagttgctccgaaccgtgtattcaaaggcaaaaaacttgctggacgtatgggtggagaccaagttactatccaaaacttagaaatcgttcaagttgacactgagcgcaacttattactagtaaaaggtaacgttccaggtgctaagaaatctcttgtagttgttcaaggcgctgtgaaggttagcaaataattcacaataggaaggaggaattccaatgccaaaagttactgtatataaccaaactggttcacaggttggtgaaatcgaattagctgaagctattttcggtatcgaaccaaatgaagctgtacttttcgaagctgtaatgatgcaacgtgcatctttacgtcaaggtacacacaaagtaaaaactcgctctgaagttcgcggtggtggtcgtaaaccatggcgtcaaaaaggaactggacgtgctcgtcaagggtctatccgctctcctcaatggcgtggtggtggtacggtattcggacctacaccaagaagctatgcgtacaaacttcctaagaaagttcgtcgtttagcaatcaaatctgcattagctactaaagtagttgagaacaacattgtagttcttgaagacctagtgttaaatgcaccaaaaacaaaagatatgctagcagtacttaaaggattaactgttgagaagaaagctcttatcgtaactgctgatgcaaacgaatctgtagagttatctgctcgcaatatccctggagtaacagtaatcactgctgatggcgtaaacgttttagacgtgcttcatcatgataagctaatcatgacaaaagcggcagtggaaaaagtagaggaggtgcttgcataatgagagatcctcgtgatatcattaagcgcccagttatcactgaacgttctatggaaatgatggctgaaaaaaaatacacgttcgatgtggacgttaaatctaataaaacagaagttaaagatgctcttgaagcgatctttggtgttaaagtagaaaaagtgaacatcatgaactacaagccgaaagcaaaacgcgttggtcgtcacgctggttttactagccgtcgtcgtaaagcaatcgttaagctaactgctgacagcaaagaaatcgaaatcttccaaggcgtttaattcttactaaagaaggagggaaattgagatgggaatcaaaaagtataatccaactactaacggtcgtcgtaatatgactacgaatgatttcgctgaaatcacgactgatagacccgaaaagtcattacttgctcctttaagcaagaaggctggtcgtaataaccaaggtaaaatcactgtacgtcatcaaggtggcggacataagcgtcaataccgtatcatcgactttaagcgtaacaaagatggaattccaggacgcgttgctacgatcgaatacgatccaaaccgctctgcgaatatcgcattaattaactacgttgacggtgaaaaacgttacattcttgctcctaaatctttagaagtaggtatggaagttatgtctggcccagaagctgacattaaaatcggtaacgcattaccattaatcaacattccagtaggtactgttgttcataacatcgagcttaagcctggtcgtggcggacaattagttcgttctgctggtacatctgctcaagtacttggtaaagaaggtaaatacgtacttgtacgtttaacttctggtgaagtacgtcttgtattatctgcttgtcgcgcttcaatcggtcaagtaggtaacgaacaacacgaacttatcaaaatcggtaaagcaggtcgctctcgctggttaggtaaacgcccaacagttcgtggttctgtaatgaacccggttgatcacccacacggtggtggtgaaggacgttctccaatcggacgtaagtctccaatgtctccatggggtaaaccaactcttggattcaagactcgtaagaaaaacaaagcgtctgacaaattcatcgttcgtcgtcgtaaaaaataatgggattgtagtacggttcatttctagaaccgtacgccaatcacgaagggaggcaccaaaatggctcgtagcttaaaaaaaggaccatttgtcgatgatcacttaatgagcaaaatggaaaaattagttgcatctgagcaaaaacaagttgttaaaacttggtctcgccgttcaacaatcttccctcagttcatcggacacacaatcgctgtatatgatggtcgtaaacacgtacctgtgtacatcactgaggatatggttggccataagttaggtgaattcgcaccaactcgtacgtacaaaggtcaccttgctgacgataagaaaactagaagataatgagaggaggcacttcaatgcaagctaaagcagtagcgagaacagttcgtattgctcctcgtaaagttcgtttagtagtagacttaatccgaggtaagcaagtgggtgaagcgattgctatccttaaccacacaccaaaaactgcttctccagttgtagaaaaagttttaaaatctgcaatcgcaaatgcagagcacaattatgagatggacattaacaacctagttgttgaaaaagttttcgttgacgaaggtccaacgttaaaacgtttccgtccacgtgcaatgggtcgtgcaagccaaattaacaaacgcacaagccacatcacagttgtggtatcagaaaagaaggagggataatcgatgggtcaaaaggttaatccaattggtcttcgtgtcggcgttatccgtgactgggaatctcgttggttcgctgagaaagattacgctacattattacatgaagacatcaaaatccgtgagtacattaatgtacgcttaaaagattctgctgttgctaaagtagaaatcgaacgtgcagcaaatcgtgtaaatgttacaattcacactgcaaaacctggtatggtaattggtaaaggtggtactgaagttgaagcacttcgtaaagctcttaaccaattaacaggcaagcgtgtacacatcaacattttagaagttaagagagctgatcttaacgctaaattagtaggcgaaaacatcgctcgtcaattagaaaaccgtgtatcattccgtcgtgcacaaaagcaagttattcaacgtgctatgcgtgcaggtgctaaaggtattaaaacacaggtttctggtcgtcttggcggagctgatatcgctcgtgcagaatcttacagtgaaggaactgttccacttcatacacttcgcgctgatattgactatgcagcagttgaagctgatacaacatacggtaaattaggcgtaaaagtatggatctaccgtggagaagtccttcctacaaaaaagaaagcttctgaggaaggaggaaaataatatgttaatgccaaaacgcgtaaaatatcgtagagagcatcgtggtaaaatgcgtggtcgtgctaaaggtggaactgaaattgctttcggtgaattcggtttacaagcacaagctgcttcatggattacaaaccgtcaaatcgaagctgctcgtcgtgcaatgactcgttacatgaaacgtggcggtaaagtatggattaaaattttcccttctaaaccttacactgcaaaacctctagaagtacgtatgggttccggtaaaggggcaccagaaggctgggtagcagtagtaaaacctgggaaaattatgtttgaaatcgcgggtgtatctgaagaggtagcacgcgaagcattacgtcttgcagctcacaagttacctgtgaaatgtaaattcgtaaaacgtgaagaaaatggtggtgaatctaatgaaaactaatgatattcgtgaattaaccactgccgaaatcgaaacaaaagttaaagctttaaaggaagagttgtttaatcttcgcttccaacttgctacaggacaattagagaatccaactcgcattcgtgaagtgcgtaaagcaattgctcgtatgaaaactgtagttcgtgaaagagagatcggaattaatcgataaattgaggggaggtttgcatagtgagcgaacgtaaccaacgcaaagtttatactggtcgtgtagtgtctgacaaaatggacaaaacgattacagttttagttgaaacttacaaaactcattccttgtacggaaaacgtgttaagtattctaagaagtacaaagcccatgatgagcaaaaccaagcgaaacttggcgatatcgttaaaatcatggaaactcgcccgctttctgctactaagcgtttccgtttagttgaaatcgttgaagaagcggttattatctaaatagacgaatcggaatttttagtccgaagggaggtttcataacatgatccaacaagaatctcgtttgaaagttgctgacaactctggtgcacgtgaacttttaacaattaaagtattaggcggctctggtcgtaaatatgctaacattggtgacattatcgttgctacggtaaaacaagcaacaccaggtggcgttgttaaaaaaggtgacgttgttaaagcagtagtggtacgtacgaagagcggagctcgtcgtccggacggttcttacatcaaatttgatgaaaacgcagcggttatcattaaagacgataagagcccacgtggtactcgtatcttcggaccagtagctcgtgaattacgtgatagcaacttcatgaagatcgtttctttagctccagaagttctataatttaaggtattgccttgctaaggaggtgcagaattaagatgcatgtaaaaaaaggtgataaagtacaggtaatcactggtaaagacaaaggaaaacaaggcgttatccttgtggctttcccaaagcaaaaccgtgttatcgttgagggtgtcaatatcgttaagaagcactctaagccatctcaattaaatccacaaggtggaattattactaaagaagcacctattcacgtttctaacgttatgattttagatccgaaaacaggtgaacctactcgtgtaggcttcaaagtagaagatggtaaaaaagttcgtattgcaaaaaaatctggtgaattattagataaataattttcttaagaaaggaggtcacttcattgaatcgccttaaagagaagttccaaaaggaaattactcctgctctagtgagcaagtttaactataaatctgtaatgcaggtaccaaaaatcgaaaagatcgtaatcaacactggtgttggtgacgcggtatctaactcaaaagcgttagacaacgcagtagaagaattaacacaaatcacaggtcaaaaacctgttgtaactcgtgctaaaaaatcaatcgctggtttccgtcttcgtgaaggtatgccaatcggtgcgaaagtaactttacgcggcgagcaaatgtatgagttcttcgacaaattagtatcagtttctttaccacgtgtacgtgatttccgtggtgtttctaagaaatcattcgatggtcgtggaaactatacattaggtgttaaagagcaacttattttccctgagattgattatgataaagtaagcaaagtccgcggtatggacatcgtaatcgttactacagcgaaaactgatgaagaagctcgtgaacttttaacacaattcggtatgccattccaaaaataatggaagccaacgctaagtagaggaggcgaaaacgtggctaaaaaatctatgatagcgaaacaaaagcgtactcctaagtttaaagtacaagagtatacacgttgcgaacgctgcggtcgtccgcattctgtataccgcaaatttaaactttgccgtatttgtttccgtgaacttgcatataaaggtcaaattcctggtgttaaaaaagctagttggtaaaacccacaaatgggaaggaggtaaaacacatggtgatgacagatccaattgcagacatgcttactcgcatccgtaatgcgaacatggtacgtcatgagaaattagaggttcctgcttctaaaatcaaaaaagagatcgctgaacttttaaaacgtgaaggtttcattcgtgatgtagaatacatcgaggataacaaacaaggtatccttcgtattttcctgaaatatggtgcaaacaatgaacgtgtaatcactggattaaaacgtatcagtaaacctggcttacgcgtttacgctaaagctgacgaagtaccacgtgtacttaacggattaggtatcgctcttgtttctacatctaagggagtaatgacagacaaagacgctcgtcaattacaaactggtggagaagtagtagcatacgtttggtaatatatatttaaaacgaacggaggtgtgaccacatgtctcgtattggtaaaaagattcttgaaatccctgcaggtgttactattacagttgcagaagacaatactgtaacagtaaaaggccctaaaggtgaattaactcgtactttcaatgctgatatgcttatcaaaattgaagagaatacattaacagttgagcgtccatctgaacagaaggaacaccgtgcattacacggtacaactcgtgctttaatcggaaacatggttgaaggtgtaactgaaggtttcgcacgcggacttgaattagtcggtgttggttaccgtgctcaaaaacaaggtgataaacttgtattaagcgtaggttattctcatccagtagaaatgactccggaagcaggtcttgaagttgaagtacctgcaccaactaagatcgtaattaaaggtatcgacaagcaacgtgttggcgaattcgctgctaacatccgtgctgtacgtgctcctgagccttacaaaggtaaaggtattcgttacgaaggcgaagttgttcgtcgtaaagaaggtaaaactgctaagtaaacccgttaggtgagagaaaggagtgacaagaatgatcactaaagctgataaaaatgcgactcgtaagaaaagacatgcacgtgtacgtgctaaacttactggtactgcagagcgtccacgtttaaacgtgttccgttctaaccaacatatttacgctcaagttattgatgatgtgaatggtgtaacgttagtaagtgcatctactcttgataaagaccttgctcttaacggtactagcaatattgaagctgctacgaaagttggagaatcagttgctaagcgtgctgtagagaaaggcgttaaagaagtagtatttgatcgcggtggttacttataccatggccgtgttaaagctctagctgaagctgctcgtgaggctggattacaattttaatggtcaaaggagggaaaattgatgcatcgcattgacccaagtaaattagaacttgaagaacgtgtagttacgataaatcgtgtcgcgaaagttgttaagggtggtcgtcgtttccgctttgctgcactagttgtagttggcgataaaaacggtcatgttggattcggtactggtaaagcacaagaggtaccagacgcaatccgtaaagctatcgaagacgctaagaaaaacttaatcgctgtaccattagttggtacaacaattccacacacaatcaacggtcattttggcgctggtgaagtattcttaaaacctgctgctgagggtactggtgttattgctggtggacctgttcgtgcggtccttgaattagctggtgtacaagatattctttcgaaatctcttggttctaacacaccaatcaacatgattcgcgctactgtgaacggattaagcgaacttaagcgcgctgaagatgttgcaaaattacgcggtaaatctgtagaagagctactaggttaaggagggaaaacaaatggcgaaaaagttagaaattaccctcactcgtagtgtaattggtcgtccacaagatcaacgtgcgacggtagaagctttaggtcttaaaaagttgaattcaactgtagttaaggaagaaactcctgctattcttggtatgatcaacaaagtttctcaccttgtaactgtaaaagaagcttaaggataactcattaatataaggaggtgcctgggaatgaaacttcatgaattaaaacctgcagaaggttctcgtaaagtacgtaaccgtgtcggtcgtggtatcggttctggtaacggtaaaactgctggtaaaggtcataaaggacaaaacgcacgttctggcggcggtgttcgtcttggcttcgaaggtggtcaaactccattattccgtcgtttacccaaacgcggcttcacaaacattaaccgtaaagagtttgctattgtaaacttatcaacgttaaatcgttttgaagatggtacagaagtaacacctgaattattgctggaaactggcgttatcagcaagttaaacgacggtgttaaagttcttgcaagcggagcagtagagaaaaaactaactgttaaagcgcacaagttctcttcaagtgctaaagaagcaattgaagcagctggcggatcagttgaggtgatctaatgtttcgtacaatctccaactttatgcgcgttgctgagataagacgtaaaatattattcactttagcgatgttaatcgtattcaggattggcacgtttatccccgtgccatttacaaatggagacgtactgaaggcacaagatcaattaaatgctttaggtattctaaatacatttggcggtggagccttgaaaaacttctccatctttgcgatgggaatcatgccgtatattacagcatccatcatcgtgcaattattgcagatggatgttgttcctaaattttcggaatggtcgaagcaaggtgaaatgggccgtcgtaaattaacgcaattcacgcgttactttacaattgttcttgcgtttattcaggggtttggtatgtcaatcggttttaacggtatggtaggtggacaattaattttgaatccaggttggagcacttatttatacattgctacggtactgactgctggtactgcatttttaatgtggttaggtgaacagattacagctaaaggtgtaggtaatggtatttccatccttatctttggcggtattgccgcagcgatcccaagtgttatatctcaagtgtatcagcaacagtttcaaaatatcggagatcaattgttcatgagtatcgttaaagttgcattgattttactagctgtgctagcagttattgtgggtgttattttcattcaacaggctgttagaaagatcccaattcaatatgcgaagcgtgtaacaggaggaaatggtggttatgctggagcacaaaacacacatttaccgcttaaggtgaatagtgctggtgttattccagtaatttttgctgtttcattcttaattacgcctccgactattgcacagttcttcccgaaacatgatgtatcgcagtggattattgcaaactttaactattctcacccagtgggaatgatcatatatgttgcgctcattgtagccttcacatatttctatgcatttgttcaggttaatccagagcaaatgtcagagaatctaaacaagcaaggtggatatgttccaggtattcgtccgggtaagaatacggaacaatatctaacaaaaatcttgtatcgtttgacctttgtaggatcaattttcctagcagcgattgcaatcttaccagttatctttacgaaattgggaaatcttcctccatctgcacagatcggtggaacgagtatgttaatcgttgtcggcgttgctttagaaacaatgaagcagctagaaagccaactggtaaaacgccattacaaagggtttatcaagcagtgagtaagtgggaagaattgtcttccctacatgctcatgtactctgagggggaacaaggatgaacttaattttaatggggcttcctggtgctggtaaaggtacacaagccgaacagattgttgccaagtataacatccctcacatttcaacaggagacatgttccgtgcagctatgaaggctgaaactgaaatgggtctacaagcaaaatcttttattgataaaggtgcacttgttccagatgaagttacgatcggaatcgttcgtgaacgtttaagtcaagacgactgcgtaagaggtttcttactagacggtttcccacgaactgttgcacaagcatcagctcttgaagaaattatgaaagatcttggcaaaaaaatcgactatgttttaaacattaatgtggattcagggttgttattaaaacgccttacaggccgtcgcatttgtaaagagtgcggtgcgacttaccacttagaattcaatccaccagcaaaagctgatgtgtgcgataaatgtggtggcgaattatatcaacgctctgatgacaatgaagaaactgtagcaaatcgtttagatgtaaatattaagcaaacaaaacctttgcttgatttctacgaagagcttggttacttacaaagcattaatggtgagcaagatatcaataaagtatttgctgatatcgatgttctcatcggaggcttagcgtaatgataatctgcaaaactcctcgcgagatagaaatcatgcgagaagctggcaggatcgttgctttgactcatcaagagttgaaacagcacattactccaggaattacaacgaaagagctcgatcaaatagcggaaaagacgattcaaaaatatggtgctacgccatcttttaaaggatacaacggatttccggggagcatatgtgcttctgtaaatgaagagcttgtacacggaattccagggaagcgcaagctcaaagagggcgatatcatcagtatcgatattggtgcgaaatacaatgggtaccatggagattctgcatggacgtatccagttggaaacatttctgaatctgttcaaaagctacttgatgtcacagaaaaatcgttgtatcttggtctagaacaagtaaaaccaggcgagagattatcaaatatctcacatgcggttcaaacccatgctgaagagaatggattctcgatcgttagggagtatgttggtcacggaatcgggcaagacttacatgaggaccctcaaatcccgcactatggtccaccaaatagaggccctagattaaagccgggaatggtcatctgtgttgagccgatggtgaatcaaggaagacgatatgtaaaaacactatctgatgactggacagtggtaacggtagatggtaaatggtgtgcccattttgagcacacgattgctcttacagaagcaggatacgaaatccttaccactttataagtagctggctctccgggatttcagagcagtgtaaaatgttactgatttgaagaagggagaactattgaatggctaaagatgatgtaattgaagtcgaaggtaccgttcttgaaacgttgccaaatgctatgttcaaagtagaattagagaatgggcatgtcgtattggctcacgtttctggtaaaatccgtatgaacttcattcgtattttaccaggagacaaagttacggtagaattatctccgtacgatttaaatcgtggtcgtattacgtaccgttttaaataatatagcactccgtaatctttaaggaggttcgagacatgaaagtaagaccgtcagttaaaccaatctgcgaaaaatgtaaagttattcgtagacgtggaaaagtaatggttatttgtgaaaaccctaaacataaacaaaaacaaggttaatcagaaggaggtgcattcgtaatggcacgtatcgcaggtgtagatattcctcgagacaaacgcgttgttatttctttaacttacgtattcggcattggtcgcacaactgctgaaaaaattcttgctgaagcaggtatttctgaagaaacacgagttcgtgatttaacggaagacgaattaggacgtatccgtgatatcatcgatcgtattaaagttgagggagaccttcgtcgtgaagtatctcttaacatcaaacgtctaatggagatcggttcttaccgtggtcttcgtcaccgtcgtggtttaccagttcgtggtcaaaactctaaaaacaatgctcgtacacgtaaaggtccacgtcgtacagtagcaaataaaaagaaataataagtaaaggaggttgaactaacaatggcacgtaaaacaaacactcgtaaaaaacgtgtgaaaaagaatattgaagctggtatagctcatattcgttctactttcaacaacacaatcgtaacacttacagatactcacggtaacgcactttcttggtctagtgctggtgcacttggtttccgtggatctcgtaaatctactccattcgctgcgcaaatggctgctgaaactgctgctaaagctgcaatggaacacggtttaaaaactttagaggttactgttaaaggtcctggtgctggtcgtgaagctgcaattcgtgctcttcaagctgcaggtctagaagtaacagcaattagagatgttactccagttcctcataatggatgtcgtccaccaaaacgtcgtcgtgtgtaatttttctgtatagaattttcccttttgtctataatggatatgatgcattatcgagaaatttcgtacagaaacatcgcttgttgtgcacaatcgggaactgcctaagggggactttcggttagacaggggttatacctttgtttaaccggggtttcgacgttttgaaggagggtttagttaatgattgaaatcgaaaagccgaaaatcgaaacggttgaacttaacgaagatgctaaatatggtaaattcgtaattgaaccgcttgagcgtggatatggtactactttgggtaactccttacgtcgtattcttttatcctcactccctggtgccgctgttactgctatccaaatcgatggcgtattacatgaattttcaacagttgagggcgtagtagaagacgttacgacgatcatcttaaacttgaaaaagttagctcttaaaatctactctgaagaagagaagacgttggaaattgatgtacagggcgaaggtattgtcacagctgctgatattactcacgatagtgatgtagaaatcttaaatccagatttacacattgcaacgttagcaaaagatgcgcatttccgcgtgcgtttaactgcaaagcgtggccgtgggtatacgccagctgatgcaaataaaagcgaagatcaaccaataggagtaattcctattgattctatttatactccagtatcacgtgtgacttaccaagtggaaaagacacgtgtcggacaagtggctaattatgataagcttacgcttgatgtatggacggatggaagcatcgggccaaaagaagctatctctttaggtgccaaaatcttaactgagcatttaaatatctttgttggtttaactgatgaagcacaaaatgctgagattatggtcgagaaggaagaagatcaaaaagagaaagttcttgagatgactatcgaagaactagacctttctgttcgttcttataattgcctaaaacgtgcaggaattaatactgtacaagagcttgcgaacaaaacagaagaagatatgatgaaagttcgtaacttaggacgtaaatccttagaagaagttaaacataaacttgaggaattaggtttaggtttacgtaaagacgactgaggatttaaacccatcaacaaaggagggaactacgaatggcatacagaaaattaggccgtacaagtgcgcaacgtaaagctatgttacgtgatttagctactgatttaattatcaacgagcgcatccaaacgacagaaactcgtgcaaaagaacttcgttctgtagtggaaaaaatgatcactttaggtaaacgcggagatcttcatgctcgtcgtcaagcagcagctttcattcgcaatgaagtagctaacgctgagactggtcaagatgcacttcaaaaactattcgctgatgtagctccacgctatgctgagcgccaaggcggatacactcgtattgcaaaaattggtccacgtcgcggagacgcagcaccaatggtaattatcgagttagtataatgataattaaaagggcaggacagttcttttcaagaaactggtcatggcccttttttttaaatataaaaataggctaactgtgcgaaggaaagggtgccttatattgaaaaaagagaaacttcggatagaaaatatatcatttcaatatcctggggcagccacttatgcattaaaagatgtttcattttccttatatgagggagaatgggtatctattattggacaaaacggttcaggaaagtctacacttgcaaaattattgaatggtttgtttttgccagaagcagggactattacagtaaatgatacaatggttttatcagaggaaacggtatgggatgttcgaaaacaaattggaatggtatttcaaaatccagataatcaatttgttggaacaacagtgcaagatgatgttgtatttggcttagagaatatcggaatgccaagagaacaaatgattgaaagattagaacaggccttgcgacttgtccgtatggaagattttcttaatgatgagcctcattccttatctggtgggcaaaagcagcgagtggcaatagcaggcgttttagcacttcaaccatctattttaatattagatgaagcaacgtcaatgctagaccctcaagggagacgtgaagtagtagaaacggttagacaacttgttactcaaaaaggtattaccgtgttatcgattacgcacgatttagaagaagcggcacagtcagatcgtgtcattattttaaataagggagaaatattagaggaagggactccagaaaaaattttcaaatcctctcatatgctccaagaaattggcttagatgtaccgttttcagtgaaaatagcagaattattaaaaagaaatgaaattctcttgcaaaatacgcatcttacaatggaaagcttggtgaacgaactttggagattacattccaaaaagtagagcatcgttatcaatataaaactccatttgaaagacgcgcactttatgatgtagatgtgtcgtttccaagtgggggctattatgccattattggtcatactggttcaggtaagtcaacgatgattcaacatttaaatggtttattgcagccgacaaatggtacagttcaaattggtgaacatttgatttcggcaggaaagaaagaaaaaaagttaaagccactacgtaaaaaagtaggggttgtctttcaattcccagaacatcagttgtttgaagagactgtggagaaagatatttgtttcggccctactaattttggagtatctgtagacgaagcaaggcaaaaggctagaaaggcaattgaacttgtagggctagaaccggaactgttaacacgttctccgttcgaattaagtggtggacaaatgagacgtgttgctatagcgggtgtactggcgatggaacctgaagtgcttgtattagatgaacctacagcaggactagatccaaaagggcagaacgaacttatggagatgttttataagctgcacaaggaaaaggggcttacagttatccttgtaacgcataatatggaggatgctgctcagtatgcggagcagattgtagttatgcataaaggaacggtctttttgcaaggaagtgcagaggaagtattttcacatgccgatgaactagagaaaattggtgtggatcttcctatgtcattaaagtataaacgtgcaattgaagagaagtttggtatttcaattccaaaggctaccttatctttagaggatcttactcatgaagttgtgcaggtgttacgaaaaggtggtcatgaatcatgcagcagttgattattgggagatatatcccggggaattcacttattcatcaacttgatccacgtacgaagctgctgattgtctttttatatgtatttgttgttttcttagcaaataatgcgatttcatatggatttttatttttatatgcactcattgctttattttttgcaaaagtgccgattcgttatgtactttcgggcttaaaaccaattttatggatttttctttttacatttttcctgcatatttttacaaataaggagggggatgtactattccagcttggttggttttcgatatatgaaaaaggattagagcaagggatatacatttctgtacgattcttcgttattattttaatgacgacattattaacgttaacgacgacacctattgaaattacagatggtttggagacgttattaaagccgttgaagcgtataaaggttcctgttcatgaaatcgcattaatgatgtcaatttctcttcgttttatcccgacattaatggatgaaacgagtaaaataatgaaagcacaagcgtcacgtggtattgattttgccgggggaccgataaaagatagaatgaaagctattatttcactgctcgttcctctgtttatcagtgcttttaagcgtgcagaggacttagccattgcgatggaagctcgtggatatcaaagtggtgaaggacgtactaaatttaggcaactacgctggaaaaaaagcgatacagtaacgattgtcagcttattttgtttagcttgtattttggcatgggtgcgatcgtaatggagaatagagaaatggatagaataaaatgtacggttgcatatgatggcatgcatttttgtggttatcaaattcagccgaaccatcgtactgttcaacaggagatagaaaaagcattgcagaaattgcataagggagaacttgttcgtgttcaggcatctggtagaacagattctacagttcatgcaaaaggacaagtaatacactttgatactcctttgtctcttgaagagtggcaatggattaatgctttaaacacaatgttgccagatgatattgttattaggcaagtagagaaaaaaacagaagaatttcatgcacgttacggtgttgagaaaaaagaatatcgttatcgtgtattattatcaaagactgcggatgtattccgtagaaattacgtatatcaatatccatacccgctcgaaatcaactctataagaaaagcaattccttattttattggaacacatgatttcacttctttttgttcggcaaaaactgacaaaaaagataaagtgcgaacaatttatgaaatcgagttaattgaacaaaatgatgaaataatttttcgttttgtaggtaatggatttttatataatatggtcagaattattgttggtacgttacttagcgtagggcaaggaaagcttgatcctgatagcattccagagattttagcgaaacaaaatcgtcagtttgctggaaagatggctccaggtcatgggctttacttatgggaggtaaactataacaactaatcctggtgtaacatttgcttgacattagaaactcaaaagtatatcataacatatggtattgtttctaaaaccacgattagccccggaaggaaatcgtgtttaagataaacaatagattttttctatggaaaagataacgaggagggaaacacatgcgtacgacttttatggcaaaagctaacgaagttgagcgtaaatggtatgtggttgatgctgaaggtcaaactttaggtcgccttgctagtgaagtagcatccattttacgtggtaaaaacaaacctacatttacaccacacgttgacacgggtgatcatgtaattattattaacgctgagaaaattcatttaacaggtaataaattaaacgataaaatttactaccgtcacactaaccacccaggtggacttaagcaaagaacagctcttgaaatgcgtacaaactaccctgtacaaatgttagagcttgcaattaaaggcatgcttccaaaaggacgcttaggccgtcaagtttctaagaaacttaacgtgtatgctggagcagagcatccacaccaagcacaaaaaccagaagtttacgaacttcgcggataattaattaaaggagggcttactttggcacaggttcaatactatggcactggacgtcgtaagagttcagtagcgcgcgtacgcctagttccaggcgaaggacgcgttatcattaacggtcgtgattttgaaaactatatcccatttgctgcattacgtgaagtagtgaaacaacctctagttgcaacagaaactttaggtaactacgatgtacttgtaaacgtaaatggtggtggatacactggtcaagctggtgctattcgtcacggtatttctcgcgctttattaaaagctgatccagaataccgtctaacactaaaacgtgcaggtctattaactcgtgacgcacgtatgaaagagcgtaaaaaatacggtcttaaaggcgcacgtcgtgcacctcagttctcaaaacgttaatttttgcgaactacaaaccccaaccattttggttggggtttttttatgtttcattcctcttttgcaatttttatagcttggaatattttagtgctaccgccacgcgtatgcttcttctttagaagtttagactaatacgtattagggaggtttataagtactatgaatgtcattgtcagcttacaagaaaaacaaaaagaaaagcagttaaaatacgagcggaagatgttgcgggaattatcattaaaaacattgcgttcaaatattcgtgatgcctttcaaatgcaagagcttcatcgtcagtatgaagattactgtattgaattagggatagaatcttatttattaggagcgagatacagtaaatttggttattatggtgaatcgttttttgatgtgaaatatagagctttagaagaagaacaacaattaactgaaacgctatttcaatttttaacgagtatgactatgcgagaaataaagttgaaagatgaggaattactttttgaatcttgtcagcagtttataggattgtggtggcaagaagggtatgaaaaaggtgaaagaagatatcgattaaagcttcattaagacaagcataaactttcctcttgtcccatataagtaattagagggactagctggaggaggaaaggtatgaagagaattcgaattatctcttttgcactcgctgcggttgtattgttttttttagttaaacaagaatttcaaattacaaaatcgtggcgagcttggaatttacccttatcagggaaagtaattgtattagatgctgggcatggtggaccagatggaggggctgttggtggaaaggatattatagaaaaggatattacgcttgaaattacaaaaaaggtacaagactatttacaagaacaaggtgcactagttattttaacgcgtgagggagattatgatttagctaacaaagatacaaagtcatatagtagacgtaaagcagaggatttaaaaaaacgtgtagaaatcatcaataaacctgatgtagacttttttgcaagtattcatttaaatgctttaactagtagtggatcgaaaggcgcacaaacgttctattaccgctcttcgattgaaaatgaacgtgctgcaaaatttatacaggctgaattgagaacaagtttagaaaacacgaatcgttctgctaagacaatttcgcatgtatatttattaaagtattctaaaacaccaggtgctttaattgaagctggctttttatcgaatgtgaacgaaaggtatatgttaaattcggagaaatatcagcaaaaggtagcagctgcaatataccgtggtatattacgttatttcacggaaaaaggaaatcctccagaataaggaggatttttttgagcttctctcgttaacgaagttttcggaaaatatgttatactggaaatgtaaacgcatttatttcaaggataagcagagataaattcaattaacattacgttatttttcatacagggggctgggctaattatgataacgaaagagcaagtggttgaagcgttagaagggattgtagatccgtttttacataaaacattaaaagaaacaagtgcaattaaagaggtaacagtcaagccagagaaggaacatgtgagtgtcaaaattgcaatcgtaaaaaccggtacagcggaacaaatgcagttgcagtctggaattgtaaagttagtaaaagaacttggggcagcaacagttggacttcgttttgcagaatttacagaagaggaattagctcagtttgcaccggaacaagaagaagagcaaagtgaatctttattgtcacctaattcaaaaacaacattcttagcagtagcgagtggaaaaggtggcgtgggaaaatcaactgtttccgttaaccttgcagttgctttagctcgtttaggaaaaaaagttggtattattgatgcggacatttacggttttagtgtgccagacatgatggggatagaaaaacgtcctatcgtaagaggtgacaagataattccggtggaacgtttaggtgtaaaggtaatctcaatgggcttctttgtagaggataatgcaccagttatttggagaggacctatgcttgggaaaatgttaaaccacttcttcacagaagtagaatggggcgatttagattatttagtactagatttgccaccaggcacaggtgatgttgcgttagatgtgcactcaatgttgccatcttgcaaagagattattgtaacgacgcctcatccaacagctgcgtttgtagcagcgcgtgctggagcgatggcattgcgcactgaacatagtattcttggtgttgttgagaatatggcatattttgaaagtaaggtaactggtgagaaagaatatgtatttggaaaaggcgggggagataagttagctaccgaattacaaacgaatgttcttggtcgcattccgctacaacaacccgattggaataaagaagactttgctccttcagtatatgaagatacacatacaacgggcattatttatagtaaaatagctgaaacagtaattgatagaacagctgttacacaaaaataaagtgaaactttaatcagtggggttcacctgttactgacaacaataaggcttttgttgctagtaaacctttcgcttaactagagggtgccatttcgtctgttaatagcaagataaagtaataacgagtgaacaatgtataaattgtccactcgttattatagttattattttttactattcttccttcttcccgccttgagaaccaccgtcaccgcctgcttctttcttaccagatccgcctttttcagctttttgcacacctttactaatgatatcaatcatcttggcttggaagagtggactttcagcagtttctgttagtacttgttgtagatattgacggtattctttactcttcattgtttgtaacatcattttttctacttcaggatttttcataatttctataacgcctgcttggtattcagggtcttttaataaggttttcattaattgggtttgttctttccccatacttttagcgaacttcgatgagaactcaggatctttaaagagcttttcccagaattgttgccctttatcggataccatggcatcttcaatcgttttctttactactgtttcatctagtatgagtgcttgtttcattttttcatcagttaatacatcttgaatagctttcttaccttgatctgtttttaaaatatcaacaatcattttctttgtttgatcgtaatctagttcggatttcgtttcttttccttgtgcgcatgctgcaagtgcgataagtagaaaagaagaaacgaaaatgaatagcatccgtttcataagttggaactcctttcagcacagttctctctttttaatataaatatctttaaggaatttatacatgaacatggctagctttttgaaattgtcattgatacaatttaattagaaatataaggataatgggggatgtgttgtgaatagccgcaagtgggtacgactatttttaacgacgttgtttcttggtggaattagcacagttattattggttttgttttggagtgggacaagtacaatgaattttttcaaaatttcgacggtaaggagattttagcagtatctttctggctgatgggtgtaggatttatttttagtgttataagtcaaatgggattctttgcatatttaacaatccaccgttttggactagggatgttccgctcatcttctttatggaatgcagtccagctcttctttattgcattcgtattatttgattttgtgtatttaagatctgtacttattgcaaatggggaagtctcgttagggaataacatacttgttgctggaatattatttgtgtttggagcaattgttgcttatgtaaaaagcaaagaaacaaataaaaaagcatttgtgccagctctgttctttatggttgttgtaacgatccttgaatgggtaccagcgcttcggattaatgatacagattggttatatttaatggttataccgctattgttatgtaacgcatatcaattacttgtattacatcgtttaatcggaaaaacaagtaaatcagcttaatagagagattttatacaccagcagttataatgctggaaatggtatgattcaaaaagctctaccaccttcttgaaaggtagtagagctttttatgcgtgaagagtggtagggaagaagctacttcacatcttcacttttcgtacttgtgttggaaataagttgtgatacggatatttgctcatatccatcactttttattttttgcaggagcagcggtaaagctctatttgtttgaagggcagaatcggatgcgtgtaataagacgatatctccacctttcaaattattagagacagtggaaacgatgttatttacacctgggtttttccaatcgtttgaattattactccaatgcacgacggtgtatccaagtgattctgcgattttaagggttgctttgttaaattcgccactaggtggacgtaacagcttgacttgttttacaccaagtttcgtaaaaacatcttgtgctcgtaaaaggtctcgtcttatttcatttgtctctagagaagtgtaggatgtgtaattgtaccccatactaccgatttcgtgtccgtctttcatgattcgctctacaatatcggggtgtctttcggcccatgcagcagaaaggaagaatgttgcattcttaatttctctttctttaagagtatctaggattggaattgcttttttgtctccccaactaatatcaaacgtaaatgcaacttgctttttagcggtgtctcctttgtaaattactttagggcctgtagcagttgaaaaagcagattcatgtgaatatgtttttaaaaagagtagccatgctgtaaataaggacagtatcactattaagctaatgtgtttaaaatttctcttactcgtaataaaaaagaaaaacataatattacgcccctttgtccaatccttttcagttacatatatgctgtaaatataaaaaagagaacaaaggattaatatcgtaagtagtggatataatggatgataggattgtgataattgaaaatgagcggaacgtttattgttgcgtaaggaattattgaggtgattgtttgcttgggctgatgttgacaaaagaagagagaaaagaaatggaatacatattgaagagagaattagaggaacttttatttgattttgaagatgagcgtattcatgaagttgtaaaaaaagccatggaagaaagatataaaatcattttctgtttattccggagagtagctaacacagaagaatgtattcgttatgtaagaaaaagaattttttattaaaaagtgttgacgttaatagtttgtatatgttaaattaataaccgtcgctgatgcggaaacgcagaaaacgacaaaaagaaattgaaaaacttagttgacatcgaaaaacgaaaatgttaacataaggaagtcgcaaatgagcgaccaagtagttctttgaaaactgaacgaaacaaacaacgtgaaacgtcaatttttattttagatgctagacaaactaactttattggagagtttgatcctatcttgagacgtccaagagttattttacaggtctctcatgaaagtaaaaaaattaagtttaaacatactatacgaggagcgatacatatgaaaattactatttatttcggaagtcatgaagatcaagatgttcgtactatggactgtcatttagatggagaagatacagaagagattgtttctgtatcataatataaattgtagggatgaaccctcttccctacagcgtttaaggcaccctttacaggtgtcttttttgttgtttttttcgtcaaaaaccctttactttatagcgttttaatagtaaaatataaatatacgaacaaacgttctttttattttaattgtacatgaagggatgatttttacaatggctcaagcaaagcgcagaggaagaaaaaagcaaacacctatcatttcaaatacaggctttatcggctctgtctttattgatacattggagttacaaaagaaatcctattatttcgctcgtaaaaaacttcaaattgttcatcacgtacttgatggcctctctggggcaacaagttctctatttaaagaacataacatttcagcatacatgtcatgtgtgtatttacataaacaaaagaaaatcggctttgttctttcaacgaaaccatttgaacaaagtgatggtattgcttattttgtaaattatttaatcgaaaagaatttttacggtaatgatgaagaagtagaatatcaagaagtatttaatacaggttttattggtgtagtattcgctgatttatgtagtatagatcgctttaatttcgagtttgaaatgggtatgttaacgaaattaatgaaagatatgattattccggttaaagaactctttttacgccacaatgtaccggcttacatctccacttctcatttagaagaacaaaacaaattaggtttcgttttatctgtaaaaccgtatgatgaacgtgcagaagcagatttatattttgaagcgtatttaaaagagcgcgggttatttattggtgatgaagaagatgatattgataagattgttattagaaaaacagctgaattacgatagaaaagcgcaggatgctgatcctgcgctttttaagttacgttaaacactataatcttttgaatgaatttctaaatttaacttatttgctaaaattttattcaaagtaaaaaatacaatccctcctgcaatgggaagcgtgtaggctggaatgaaatttaataacagtcctgatattgcaagtgctattggctgcattattttacctaagcttaatccaatactaagaactcttcctctatattcttcaggaatctcattttgcatgaaatacattaaaggaatatcaatttgtgctatcataaatcctaaaaagaacataatcatgcaatacgtagtaacatataccaaattatttactacaataggtttaaataaaacaggtattcctgaaactatcataaaaattgccaacataaaacttatttttttcaatagataagaataagaaaaacaatcagttatcttttttactaatattgcaccaactatcatacctatcggaaaagtcccttgaatcataccaaattgcttagaattaagattgagaactgtgttaataatgtatggcaacggaacggttacagcaaagcctaaaaagaaattaagagaaattaaaatactaaaagtattttttaagcttttccgctccaataagtaagagtatccctcctttatatcttcaataaaattaatttctctaattgaacattcctcatttatgttttgctcaaacaatttaaagttaataaacaatatggaaatagccgaaaggataaatgaaataccatttataattataaaaattttaatatcaaagactgcaaaaacaatcccccctaacataggccctaaaattaaagatatagaatcgataattttacttatagaattaatactcattaaccgttctttagtaaccatattcggttttacggcccctaatcctattccaaaaaacgttgtaaatactgtcataagaaaggtagtagtataaataatgaataagtttaatccataatagttgcttaatatataaacagttattaataagcacccgcttagtacatccatacaaacgacgagtttctttttatcaaccttatcagcaatgacaccagcaaatggattcataacaatcattggaatcgttcctaatatgagcgtaatcgcaaaatgtaacgcagatccggttatttgtaaaacatacaatcctaatgcaaaactataaattgagctaccgaatagtgatactgtttttgcaattgaatataaacaaatatttcttagttcttggtttctttttttattttctatatgtaatcgtaaacttcccatcacttttcctccacttttctttgtattacataaagtgtaaattctcgggttaacccaatatcaatacactgtgtttaaaaattactacaaagaaatgaaaaaagatggagttaaccccgtgcacatcaactgaagatattagtgcctcctacaacgataaaaaataaaatgattaataagatcacatgtacaaatgcaaattttttattgaaatctaaaaaataatatggtatcttctattacgttgattaattacatatgagaatcatgtataactccaagaatatggcttgggggtctctaccaggaaccaacaactcctgactacaaaatgcgtcttttagcgtttgtagtcaggagtttttttgttctacggtaaataatgcagagaagggaatataaaaaatgaatttcaaagtatttatattagctttagcaacgatagcggtaggtcttgtatagcttatcgttggaggaatattgccagacatcgctaaagattttaatgtttcattaagttctgctggtcaattaattacaattttcgcctttacttatgcaatagcaggtcctgtattattgattttcacaagtaaagtggaaagaaaaaaattatatattatttcactttacatttttctaattggtaatctacttacttattttagtccgaactttacttttatgatgatagcaagaattttaactgctatgagtactgctttagttgtagtactttccctaacaattgcagctaaaattgttaatcccgcttatcgagcaaaagcattaggattaatttatatgggtattagctcttcacttgtactaggagtaccactaggcatattaatttcaaacacatttggctggagaattatttttttatgtatagctattttatcattggggtctattatcttaatttcagtatttttagataaaatacctggagaggaaaaccgaactcctttatctatccaattaaaggccgtttgtagtcttaaactaggatctgcccatctagctaccatgtttatgttagcaggacactatactctatatgcttattttactccttttttagaaaataagtttcacctaagcccttattggattagcatattttatttagtgtttggtatagctgcagtaagtggcggtgcgtttggcggtgtattatcagataaaataggcgctcaaaaaagtattttgatagttattactctatttgctctaatcttatttatattaccgtttactgcagtttctattatcctatttattcctgttatgatagtttgggctgcattgagttgggggcttgcaccacctcaacaaagttatttaatccaaactgccccggatacgtcagatatacagcaaagttttaataattcagccctacaaataggaatttcactcggctctgcagttggaggtatagctttaaaacaagtacataatgtcgccaatatggcctgggttggtggatctttagttttattatctttaggtttggctatcttttctcttactagacatacaccgacaagagactgtccagtgagtgctaaacatttagattaacattctctttttcttttcatcgtaaaaagtatagataggaatcgtcataaatagtcccgttataaaaacggactttttatgacgggattaaccccatctttttccgaaaaatgaatatgtataaatttcttctccttgaacaaagaaatcctcgtactttccccctcgtatcaaataatttgaagtactttcatcaatcgattgaaactgtagattttggatttctttcgttacttttacagatgtaaaattctctctgagtctaggtgcaatttggctatttatactaaatttattaaataaaataaacgaacttaataaataactattgtgtttaaaaagagaatttaattcgcacaataagaactcctcatgttcaaaactataattacttgtacctgattgatcaattacaatatcaatagaataattctgaataggtatgtttagaaaatcggcacagataaatacaatatttcttttcacatttcttctctcaattacatcttttaaaagtaaaagtttattcaaatctcgatcaacagcaatatataaacactcttccggtagttcttcataaatatttcgtaaaaagaacccaataccagaccctaaatcaagtagtattttttcatttaaatctaattgcattagtttctttttcgcccattctcctcctctttgaacattttccaaaaaagcagtatcagtttcatgaatataatccgaaatagaatcttcaagtgatttcttttcatacgctttcactgagttaccagctgttaaaacccctgaaataatcgtgtattcttcaccacaattacaaattaactttccctcaataatttgattcttattaataatgccatcttcaagaattaaatttccgttacacttaacacatttaaataaatgaagtacttttaaatctacccctaaaattgaactcgaaatttcagtttctatagataaattatgtaacgcttcctttaatttgcattttcgttcctctaaagtttttatttcttgttcaatcttttcatattttactttaaataaagattgataaaaattatccttttcatagcctaaggatttccctaaatttttataaagaaacagttctttaatttcatacaagctaaaccctagccatttgtactctaatataagttctatatccttttgacaatactcgtcaaaaaaatagtgacttccttttttctcggaaataacgagtccgaggtccatataatgtctaatcgtatctacacttacattatttacttctgcaaacttactgattttcatcctaatcactaccatttatatatttgtttatacatacttctttattatttaaaaaaatcctttcatctccctatacaaaattatttatgctatgaaaaagatgtaattaattttaaagttccgccacatccccattaagctaagcttatataagtttaactactccttttgtaatcttgaatttaaaaaagagtagcaagtagtacgtttatgtttatatatctaaaaaactgtgagttcatggatgaatttaaaactgcggcgtaagtactgcagtttcttcctttttcattgagttgaaatatgtaaaattacgtactttaactgtagcggacttgtactacgcgttcatattaattttatagacgtttaaggattttgttttatgggaagtattcttgctgtgaaattaggattgtaaatatagatgaacgtgattcaaatcaaaaaaaggtactcctagaagtaccttttttactattctatatgtgcgaacgctttcaaaattattggatataaatcgatgtacgcattgtattaaatggtgcatttatagatgtcttttggtactcaaaagttccttgttggtgtccagaagcatcccatttataataccagccaacgattggtcttccgccaattatagtggaatcaatactttttacattagaaccattcattttagcaaatgggttttggccatagcccatttctttcgttgtaatatataaatattttcccccgtggttacgcgatgtgctgaagctgttctgattaattgtttctaccccgcctagctcagactctacttgtacgacgtttagtgaagtaagtggtgctgctggtccagctgaagcttctgttgccatccctaatccgacgaacgctgtgattgctaacgatgaaatccctagtgctgctttttttaacataaaaacatccccttccatctattgttttctctttcattgtcaatataatcctaataatcttatatgtaaatagattgtaactgcagaaataatagaaagaatattctgatttattaacattgaaaaatatgacttcaacttttttcgttaaagatagtcatcaatctctaactacctaatgacctcaaataaacgctattcaagccattttaagaggtacaaaagaccttatagtatataaggtctttcccgacactctgaaaaaacccgtgaatcattcacgggttttactttaataactgattgctattgtaccttcacctgcatgaactgcaaatgaaattggtaatggatataatttgaaatccatttcagggaatgcttgtctaatatctgcaatccattcttcagctccagctttatcgttagcatggaacatgtgaagtacttttggtaattctttttcaagttcatttttaatatattctcgacatttttggattttacgaactttcttttcaagtaaaagctctccaccttttacttctaatattaagttaacacttaataaacttccaagtaaaaattgcatgccctttacacggccacttgcatatagaccttttaaactctttgggaatacatgaaaaggtcttcttttttcatctactaatgttttgtgtatatcttgtaaagtcataccatcattgtataacgatttcgcttttctaattagttcatccattggataacttgttgtttcactgtctaataccgttaatggaaaacctgccatttctgcagctaacttcatattttgataggttccacttacttttccgctaatagcaactgcaaatccttcttcatattcttctttgcatttcgtaaataactctaccatttccccaatattaggttgtgaagtagtgactgttttaccttcgtttaacgcattataaaccctttcacgtacaccttcttcacaatctttgtacgaaattccatcaataataacttcgattgggataacaaagttatctccttctgttttaaaattcgcagttgtactatcagtaatccaagcaacacgcttcatgttgttcctcccttaattcaattcctcttttctaatttttctatatatttatgttatgaaaagagaatatccctgtaatagtaacaggactttattgttttggctatagtagatgtatattaaatgtgactatttcttgtctatttcacaaataaaaaagaaaatcaaggaatttgctcgattttcttgttatcatatactatttaaaagtttcattatctaaaattacaacataatcattcgttaatcggccagcttcttttgtataactaacaagcctttgtatattatcacagcaaatttttgctccccatacgagtaacggtacgccaataaaatcgatatggaaccttctagaaaacagcccaccgaaagtcattggtaaaggtacggttggtgatgtattagaaaaaataatcttttcatgactttgataatgtttttgcaagatttctcctaaatgcttcatcgctggtacaacaacttttgatgcgccgcatccaatcgtatatacaggatgaccatgttcatctatgccatgaaaaataatttttcccatatcttctgttttcaatttattaaagtaatctacattcaaaatttcttctttcgttaacttgcgatccgttggtaatttatttaaatgatacgctgcagctagtgaggtagtatgtgttccaccaaaatctgtgtaaatgtatatcatattatcatcccttgttgtaaaagttcaatgttaattagtattaccgttcttagcaatgttaaacaagggatgaatgtatttacgctttttgtgttaattcattatattttttccaaatataataacgtctactaatcacagtgcctaatgtaatacataaaaaggcatttgttacaaccattaatgtctggtgcgtactacccgaaaacatactttgtttaatcataatttttgctcctaaaataacaagaaggattattgtacttacccaatttccttttcgtagtacatgacctgtttcactatctaatcgaaatgttaaagctcttccccgtataatcccaagacataagccaattccaagcattacaacaaacagtagtccttgcagcaaagttatttgtcccatatgaataatggattgaactgttacaaaacacaacaaagccggaatgagccaaatacggtttattttcacttttcgttctttactttgcatcaaaacaataataagaataacaagtaaaatatccatttagaatcctcctataaacttgtttatctttaaagattatattctcctcttttcattccatacttgaaataccatagctactttcaagtgtaagatgaaaaatgtgatttctcatcagccttaagcattatttataaaaataaaaagacgtactttttactcgtacgcctttaataactcgtttaaactcctatttatcaactaattccacacctttagaattagctttacccaacactcgaatgttaaatttattaatagcttttaaaaagataatataaatacaatatccaacaatagaacctataacattacagatcacatcatcaatatcagtaatacgtcccactccactaaataaagactcaattaattgtagcaattcaatactagctgatatagaaaatcctaataaaattgtatttttgaatttcttatatttatcccataggattggtgctaaaaatcctaaaggcattaataataaaatattcccgcctacatttcttacaattagaccaatcataaatagggtatctccatcataagcactaccaatttgattgatgtctttaataattgatgcaaatggtattatattgaccgagcgattcagattttcaatattaaaaggaaaaccgattggtaaagggaataaagttactgcaacaaccatacaaatgtagatcacaaataaaaaacttattatttctttccaccaaattacatgttttgtatttttggtactaattaatattccacgtacaattaaataacaaataactcctaaaataataaacacactaccgttaatcatatacaaattgttaacacatcctttcatatgaattaataataaaaatttacaactatatagtaatgttttctaatttaaaaatccatataattatatataattgtacagaattacaaaaaaaccttatttaataaataaagggttcctcgttaactaaaatatttttcaaaacagaaacaatcatgaacccgtttaaattattttcgtatctcttcttttaaatccatataattaaaaagctctttctatttctatcattaatttttcaggtcctgcccctttattcgacgtaataactaaagttattcctaattctggatatatagccgagcgaaaactgacgcctggatcatatcccattacatgatatttgaataccttgttttctcgtgtttcaatccatattccatagccgtaggactgtttatcatttacttgaatgtgaggagttaaaagtaattttgtatattcctttcctaaaatttcattattaaatagggccgcccaaaatttcagcatgtctggtgcagtaacatatgcacctccatcagctcctccttttatcggtatagagtaggcgtttgttctccaattttggttggtttcgtcctttatatatcctagagctgtatgtcttggtaatctatctaacgaaaaatagccagaatcattcatgccaatcggattaaaaatgttcttttctatatactccgtaaatttaagtcccgtctgttcttctattattaatccaagtatgataaaacctgcattgttgtagtgaaacttagttccaggtgcaaacatcatattacttttttggaataatggtaaaaagtcttttaaactctttaatagatacataggtgtttgtttccaaagatcttcgaagttatccataatactttcatcaaaataatctggtataccagcgctatgcgttagtagttgatgtattgtaatatcttcatcgaagtttgaaaattttatctctagacaatcttttaattttgtatgaaaagaaataaaacctttttcaacaagttgacagatgccaattgcagtgaaaattttacatcctgaggcaatgccaaatcttgtttgtatcgtattgtttatacattcactttggtttgcgtaacccaaagctttttcatagactaagtctttttctttttttactaaaactactccagagaaatctattttcttttgtatttcttttacaattttatcaatttcatcttttgtttttatcacgacaaccacccttatctttcggtattgttctttccccttattgatttttccatataaaggggaaagaacccttttattaaatacgataaattgttaatgagaacacaaagttcatttcgaatttatcccgctatttgtggacagtaagacccccatctcaaaattcagcgaaagcaaagaagttaagtggggaccctgctgcccgtaaaagctcgattggtgagggctgataatcagtggggggatgccccctgattaaagtttcactttattgattcagtagaatacaacttagattgtgatgggaataaagtaaacacacacaagacgatagtaataaataacataatcaatgaacctacaataactacaagttgtatagaaatgaactgagtcgcaacaccagataatattgtaataaagattgttactatcgcaataacaagtccatatatactcccaatccgtcccatcatatgaacagggatattattttggtaaaatgtataaaatcctgtatttgcatatgccattgaaaaagataaaataaagaatccaatagcagctattaaaaatacatttgaaaaagcataaattaaataaccaattgcaatgaataatgatcctattccaattagaagtgaaggtgctaatttctttgacaaaattgtatttgttatggcacctaaaataaatcctgcaccagctatactaactagaaaaccatattcactatctgttagtagtaatacctcttttgcaaacgatagttcaagtgaatcagtagcggttgctaatacgaacatactttgaaataagaagtacacgcatacgacatacacatgttttctactaaaatttataacagtgatccaatctttttttaatactgtaagggataatgtattactagttgtatccgaatcttttttcttatcaagattcggtaaaagtaatgtaatgaatcctgataaaagaaatgctatagcatttatatatatagcaaaatctggtgtactcgcaattaataaaacccctgctatcgccggaccaattaaagatgcaccagatcctattaaactacgtaatgagttgaaacgttgtctttgttctactggaattaatttcgtcatatacgtcatagcagttggctcataaattgcactggccatacttataaagaatacgaatacataaacaatccaaagtgacggaagtaaaggtaaaatagcgataaataacgcccgatatatatcgaggtgaatcattaacttccgtttatttaaacgatcaatcatactcccagaccaagcgtttgtaaataaagtggctaagggttttattacatataaagtagcaacagctaaggctgagccgcccatatgatagacaagtacattcaatgctattaagtaaatccatgcccctaaattcgcaataccaacaccggacagtaatagtaaaggatatttccaatctttaagaaagtttttcatttttggcccccgctttccaaattgttttaaaacaataaaaaaatcccacccccaagacttttaatcttagggacgagatttatcatcgcggtgccaccctagtttgttaatatgtcaccatattaaccttatcaggtactgcattctaactcatgcttataccatagctctataacgggagctcccgtcacaccatcctctaataataggttccgatgcgctgctcagaggcttggttcaataaagaatttttactccttttcagctaaatggagctctctgtgaaaaattcattttatttactcttctcttcactgcatttaattttttccatattatcacaattgtttttaactgtaaataaaaaataatcagacatttaatgatgtgtctctgttaattcatttatttattgttttttctaaaaattacggtgcgtgaaattacttacagctctaaagaaagagccatttgcatctagctccttccaaatacctgaattaattcgtattcgcctctgttaacggttgtaacggcggttctaattctagttctagtgtatctccttcttgtaaactttgtcctttttcaatactttggctcgttacataacccgtaccagatgttttcaaatctaatttcaaaagcttagagaaatacataacatcacgcatggaccaaccttttaaatttggcatttgtgcgttattccctaataaaaatatacgatccccttcactcattacctcgccagactgtggatattgttttattgtttttccttctcctaaaattattggctgtatcttctctttttctacacttttctctgctgtacccatcgattgatttacataattttgtacttttaattgagattgcttcgttgcatcagctatttgtttttctgtatacggtttcacctttaaatattcaaggctgttttttataacaggtttaaatatttcagcaagaggctgagctccatactcatctccttttaactttggctgcttaatagctaagtatacgattaactccggatcatcaattggagccattcctaaaaaggagaaaatgtaattctctttcccttccatatatcggccgttttcaggattcgggatttgtgctgttcctgttttacctccaattggataaccatccactttatacattgtaccagttccttttgaagatgttatgacacgctccattaagcttctaactttgtccgccgtttctttttttatcggattcccaatttctttcggttgattttccataataacttctttgtttgttggatttacaactttatcaacaatatatggttgcatcattttcccgtcatttgctatagcagtagccgcttggattaattgaatcggagttactgtagaaccttggccgaaagaagttgtaacctgttgaatttgcgtatttaataataaagtatttttactttcaccaggtaaatctattcctgttttttgattgaatccaaatttattcatatattgcttaaatttatttggcttcagtaactgatcttctaaaatagaaaaagctacgtttgatgacctttcaaaaccttcatcaaatgtaatagatccccatccaaatccaccattatggtcttttatatcagatgaaccaacggaatatttcccagattgaaaatactcttttccgttatatacaccttcattaatggcagctgctaacgtaaaaactttcattgttgaacctggttcatatgcatttgcaatcggatcatttaaaaagtattcgatatcacctacattaggattgtaactcggtttactagacatcgctaaaacctttcctgtttttggatcagcaataatgccaattaacatagaaggatcataatgctcttgtgctttgttcatcgcttcttctaaaaagctattaatttgtttatcaagcgttaaatatacgttattcccatttttagcaggttctacttttcctatatcattcgtaagtggaatccctcttcgtgttcccacatattctatattcccgtttgtagagcgcaaatatttatccaaactcttttcaagcccaaactttccttccgtattccctttatcatctggtctagcaaaacccagtatataggatgcaaaatcttcattcggatacactcttgctttttccgacataaaagatacacctggtatttttaaatcattaattttttccttcgtttccctagataagttccgaccaatttttccaatttcaacttgcgtacgcccctcatgaaagttttttaatacttcttctttatcaatttcaagtacatcggctaattgttgtgcggtttcatctttatttttcactttatcttttccttttaaattcacaacaactcgatacgttgtagaatcttgtactaacacctttcccgtttggtcatagatagtaccacgattcgcttctaaaacaccttttttattatgttgttcatccgcgaggtcctttacatttacattatgcacgactcctactgcctgaatatagaatatacgcaaaatcataataagaaacaaaacaataaaagcaatcatcatatatcgagcgcctttattcgtttgaagtttttgcatacttatctcctctcttttggaatggattcgtacgaagatacgttttaaaatttgtagtttttgtttacgatactatatgtttcgaagttttctttttaattcctttaaaacaatgcaaaactaactattgttattttttgttttatttaattaaaatacggtgcgtgaaatttctgaatattaacttcaccaaaacttgattgcatagcactctaaactcttttcttatttactataaaaagttcccatctggatttccaaatgggaactttttataagaaaattatgcgatatggttatattttgctaagaaaggaattcgtctcgctactaatgcatacattttgaatacaaatttcgctattggttcaaacatacgtgtactttgcattactaaaccgctcgtaacaagtgttaagaatgctgcaccaagtatatctaaaggataatgaacacctacgtacatacgtgatataccgactaacacagcccataatagcgcgatatatttcagtttttctcctctaagaataaatacgaaggcgattgaaaatacaagtacagaatgatcactaacaaatgatgaatctgctgcatgtggtactaattgatgtacatcatgtgatacgaacggacgcggatggtaatataccgcatgtataagaacatttactactaatgcaataataaccgaaagcgtcgtatataaaactgtatattgttttctaattgcattctctttctttccattattaaaccataagataagcataaataaaatggctacgtatgcagcgctatttgtaattgcaaccattatcgtatctaatagtttggatgaatcagcaaaattattaaaccactgaaatactgtgtaattcataatactctctccctacttacaagtgttcttgatttacacagtatacaataccattatgaaaatgggcttaaacttttctcatctaattctcattttactattactcatgtgacaattataaaacaaattttatacgctatttatgtataaagttcgtaaacctttataataaggcgattcgtttttttttcatgtttggaatacataacatattcatttaaatatactaattgcaaaatcatattttttaattcatttgaagtacaatatttccaaattgttctccatgttccatacggcttagtgctcgaattgcttcttctaacgagtaaactttgtcaataattggtttaatttgatatttttctataaactttatcatctcattaaattcctcacggctacccatggatgttcccataatatcaatttgattgtaaaatagcgcgcgtaatggtaattcaattttatctcctgagcttgcaccaaaattcacgattcttccgtttggttttaatacatcaaaatatttcaaaaaagttgctggacctatactatctattattaaatctactttttcaccttgtaagccctcttcccaatttccggcactatgaaaagaaatatctgcaccatattttgcagcaagttcccttttattctctacccttgaagtaacactcacttttgcgccaattgctttcgcgaataacatggcaaatgtagcaacaccaccgcctattcccggaattaaaacgtgttcgccgcacttcaatctcccttttgtaaaaagcgctctatatgcagttaatgcggataaagataaaacacctgattcttcccaagtaagatatgacggcctttctactacattttcagctggtacaattacatattcagcaaacgttccatctttcggtccacctagcacttccggtaactccggtacttcagtagcatgttcccatccaatactaggattaataataacttctgtatgtaatatgttatcagaaacaccgtttccaatttccgtaacaatacctgcaccatctgatcctaagattaaaggcaattgcatttcttttctattattcataataaataaatcccgatgatttaagcctgctgattttaacttcactttaacttccccatcattaagtgctctctcaggtgatattttatattctacaccgtcaaatccagttttatattgatgtacgatagctttcattattattcccccttaataattttaatgtactagaaatttcgaaataaacaaaatgatttgatcgtaaaaaaagaaggaatgcaagaagcaccccttctttgaaggcttattttattatacatggtaatgtaatcgtaacgattgttccttcattttctttactctctattttaatagctccgttatatttttctacaagtcgttttgcaatagacaaacctagtccgtttccaccttgttttcgacttctcgctttgtcaactcggtaaaaccgattaagaacaaatggtaaatcggattcaggtattcccgctccatgatctattacacgaattgtaactttccctgagtgtaaactggattctatgcaaatatatttattaacctcttttgtatacttaactgcattatccattatgataataataatttgttctaagtaagatgatggcattgacacataagcctcgtcatccccgaatttcatatcaaattgaaaattactttggagtactacaaagttttgtgtaacatgttttaatacgctatttacatgaactggctcagctgctattggatgcaattgttcagattcagctcttgatagttctagcaattctgaaactaatttatttaaacgaactacttcctttaaactagattgaagagatttatctaatactgctggatcatttttcccccatcggtttaacatcgctaagtgaccatgaataattgttaacggtgttcttagttcatgagatgcgtcttcgacaaactgtttctgttgtgtaaaagaagtttctacttcatccatcatctcgttaaagagaaatgataattttgcaagctcatcattattttctcgtactggaacccgttcatttagtccattctttttaatacgtttcatcgtatctgttatattttgaacacttgataatagtttcttagttataagaatcccacctaaaaaactaaatatcaatccaaatattccagcaataagcattaccactaaaataacttttaataaataatcaaatgtctctaggtttttcgtaagttcaatagttccagtaaactctttcgttttaattggtatgcgcttaactaatattcgatcttctaaatgcctttttataaatgactcatcttttataacctgtttcggctttatccacgtttcattaaaatctcgtgaaacagtaataatcggctccccatccatgtcaataatacgaatcatttgatgcttatcaatcatattgtttagaaaatctttactgtttttaaatgttttactcgaaagggtatcatttttatcttggaaatatgccgctatttccgtaacttgcctatttatttgtttctgttcataatctatagtccacttattaattacaataaactgcaaagcactatataagatgaataaaataaatactagtgtagtggaccaaagtgttagtttccactttataggtagatttcgaattcgaaacataatattttttatcatttcattatatatcccgcaccacgcactgtttggatatactcctccttatctacactatgtaacttatttcgcaaataacgaacatatacatcaacaatatttgtctcaacaattgcatcatatccccatacttgatccagtaaaacatcacgagtaagtacgcgattaatatttttcataaacataagcaataactcgaattctttatttgtaagttcaatttcttcatctcctttagttatagttcgagattcaatctgaagctgcaaatctttgaatgtaagaaatgaaacctgcttgttttcaatatgttcttctcttctaaatatcactctcatacgtgctaacagttcttcaattgcaaatggtttcggaagataatcatccgctccactatctaaacctgtcacacggtccataatactatcacgagcagtcagcataataatgggtgtatttttagtcgctcttagtcgacgacatacctctagtccatttaatccaggcagcattaaatcaagcaaaatgagatcgtaattcttttcaagtgcttcgcttaacccttttcttccatctagttgtatatctactttatacccttcatattttagttctaattctagaaaatctgctaaactttcctcatcctcaataattaaaatgtgttgcaacgatagttcctcctagacaattaaatgaataaataatcctattccaaatataattacaatgatttgatgcacttttctatacatcataaatttttcttttttatttacttgctgtaaagaaaacccaaaaacccctagtacaattaaggctaatagagaaaatataccactgtatatgagtaaaatatgacgactcccttttataaaaaagtaaacaccatgagtaattgcaacagctattatagcgtatccaattaatacatgaaacttttttgcaaatagatacacttctttaacttttttaaacccttgtatatttttcttctttaaaaacatccatatatggcgtaaaaaccataatgaagcagcgataatagccccatattcaccaaaagagcctaattttttatttaaccattttacattcagaacattgccgtacataacattaataaatagcatctctacactacaaataataatagtaatacctataattttaacacacacatggaaatatttatttcttaatatcttctccattttatttaatctccttactaataaaggctttgtaacaagcagtctatcaaataaaaaagaaaataaaatgagagaaagattaaaataaaatgagaatttcaatatcactgacaactattattgatttttttcagctaactttattatgttttgaataaacggcgcttttgcctttgtatatgaaacacgatcaaaagcatatgtaatagcaagcctctcttttaattctctatattctttacgtgcccatttatggcttattagaaagtcgcgaaataaaatattgtttctccactcgtcactattataaatataaacatgcaaatgatgagtacctgctctccattttccctttctaaaaaaacgccaattggttgcatcttttggaacatactcatatccaatttccgatagaatctcaatccagttttcagtaatttgtaagtctgttacgccaatcatcatatcaataagaggtttagctcctaatccttctactgctgtgctccctatatgttcaacagcgattatttcttgtcctaacaaggaacagaacttctcttcttcttttatatactcttcaacccagtctttttgatacggtttaataacaatttgttggtccattgtactcacctctctataagtgtttatcattatatttataaaattttatgttgttagcataggatttccacaaaatatgtcgaatagtggaatgtacaacttaattatattaaatgtgaggtaatctatgaaagataattccgtcgaagttcagttaaatagtgtaatattccaattaaaagaacatcataattttgattggcttattaaattaggtaccgtatttgcagtttttgaccagcaagattcaggtaatataagttttggtgtagaaaaaaatgggcataagaaatttatcaaatacgcaggagcacaaacaattgcatatgaaggaacaacgggtgatgctattgaaaggctaaaaaattcagttactatttatgaagatttaaagcatgaatcgctcataagattaattgatcattttccagttcaatctggatatgtattaattttcgattggtttgatggtgaatgtcttcattcgcattggcgcttcccacctcctgagaaatataaaaatccaaactctccattttataaatttagacatttacctgttatagaacgaattcattctttacattccattttttctttccatacttatgtagaaaagaaaaattatgtagcgatagatttttatgacggtagtattttatataattttaatacaaacgaaacaaaaatttgtgatatagatttatacagtaagaaaccttacataaataaaatgggccggctatggggttcctcccgttttatgtcaccagaggaatttgaactaaacgctataattgatgaaagaacaaatgtatttaatatgggagcaatggctttctcactcttaggcggtgaaaaagatcgttcttttataaaatgggaagcaagtaaggaattatatgaggtagcgtatcgtgctgtaaatgacaatcgggcagaacggtatgcatcagttacagaattctacgaagcgtggttaaaagcggctgatgcagaaaagatataaccctaaattattaaaagaaatatagagtttatactattatcatgtatagcaagaatgattttatgagcatttcatattattgtgttctaattttaaaacgaaataaaaaggacacctattcctaaaacagctttaattgctactttaatgaattggtgttctctagttttctagccggactatattcgaatgttattttaaacatcccaatagtcactattaacatcattagtatatttgctgatttccttctctttcccacacttttcacatttataataactaactatccccatcttaccagttctaaaatcttcattgtcataacttttattaagtttatatctatgtatacatttaggttcttttaatttatcaaactaatttcctaacataaattaatccctttcctctcgaaaatattctttttattcccatccccttaagcacaccttagaaaagattcacaatcaatgaaacgtggtagcttgtttttctataaacaaaaggattattttattaagtttttcacaagctatatctttgaattttcaaacttaaatgaacctctagacacatacaccatatactaatataaatactccctaagaaagaaggtgaaagctatgccatctattgtcggaaatatggttgtacaaaatagtaacggttctttcaacttaggtgatttttataacgtttctccaaaagaaaatacaaaagcttataatggttcgggttcatctaatgtcgcttttgttcttaatacatttaacggtgttagtgcaacaaacacatttgattctgatgttgccgaccaaagccaagttggaacagcctaaatttatttatttccctctacacctgaataaaacccaatataccgttaataatgtatatacagtttctgatttcccttcatacccgaaggcttagcagctagcttttgctagctgcttttagttttgcaccgaagataacttatcaaaagcactaggcacctcttattccctgtctttaattcattttattaacttatatttcaattttttggttaacaattaaatatgcccacgggaaacatattgaaaccttttcaatttttattgtcttttgcaaaaagattgctatagacccactgtatattgaactgataacataaaaaataattaataaaaggtaggggggatatgtaacaatgaattcatcaaaagtagctttttcgtcagtattaagtaacacttttatcgtcattttaaaagttgttattggtatttttactggttcagtagctattctttccgaagcaattcattcctctttagatttattagcttcaatcatcgctttcttttctgtccgaatttcaaataaaccggcggataaattacatccctatggacatggaaaagtagaaaatatttctggaacaatcgaaacattattaatttttatagctggtttttggattatttatgaatgtacccttaaattgatacaccccgaacccattcatctcccatttttaggaatagttgttatgttgattggagcactcatcaattttgtagtatcacgaattgttaacagaactgctgaaaaaacaaattctattgcaatgaaatctaatgcactacatttactcactgatgtatacacttctttaggtgttgcaatcagcttacttttagttagtataacagaatggtatttcctagacccaatcattggaattattttagctgtttatatcatgactgaagccttcgaattaatgaagaagtcctttcccccattaattgatgcacgtttattaccagtagaggaacaaaaaatcataaaaattatagaatcttatagagatgaatatattgagtttcatgattttcgttcaagacgttctggtccaactgaatacatagattttcatcttgtcgtttcatctcactataacattgaaactgcccatgaattatgtgatcggatagagaaaaatattaagaaacaatttaatcgtgctcacatactaatccatttagaaccagaacatgaaattttattaaaataactagaaacgccattaaaggaattagggatattgtaggtcgtgaaggtactactctcacgacctacaaatatctctataaaagtaagactcatatcaccatctcgcagtctaataaaatagcgtttttgttgaatttttattgagtttacattgaccttttgttgattttttcttcacatttaaaagaaacaaacatatggatattgtatgtagtctctgcgctcatagagatctacctttcttattaaagagcatgcttatatgtgtgctccttttcgcttattatgaaatatcgtttgggttaaaactccaactcgtatcgtttctttaatgacaggctccataaattcacataaggaatacaatattaaaaatttactcatgaaaatctgattacaacttttgggatttttctgtttcatgagacattcatctaccttattgagagcacatatacaagtgtgctctttttattaataaaactaattcaaataactattttgttaggttctgccccatccattttttatacgtctttccgctaatcacatttttctagaaaatcctatgttattgaacagagttatcgactttcaacttgaaaatttttacttttgatgatgtaaccacctataatggaaatatacttttttcaaaggaggtatctaatgtatatatcaaataaaattggcttatttagctggattgcaacttgtctatactttttaattgaacctttctttattttcacttctacagcaccttataactatttgcatcatgcaatgagtgatctaggtgtaacaacctgcggagaattcacctacgaaatagctccgtatgaaatatgctcccctaatcattttgggatgaatatactctttattgttaatggaataacattttgtattggagtactatatatttcacaacatctagaaaaaacaagaattaatagaatagcaacattttttatacttataataggaatctctactatagtttcaggattaattcctgcagatgtaaacctaattggacattccattctagtttggataggcatgcttacggtatttccaggactatttatttttgctaagaatcttaaaaaaactagaaaatggacatatttctgtttactaagcttaatagtaataactatccttatctcacttgtttttcttttccccttacctgcaggtctactacaaagacttttttacttggttcttttcgtttggggaactgtatcaacctataaattgataaaataaagattttattcagacttgcacataaactgaaaatatacataaaatttaattgccgatactttttaatatatcttggtcaaagagcgctttcccatgcggtctttttttctgttcaaataaggattttgttttaaacttgcacatacactcaaaacttaaataatatatatcgctgtcacattttcgttttttcgatatgagtcttgatcaaggaacgctttcctgggcgttctttttctattcttttaactcgctttctattcaagtgattattttattgagttttcaatcaaacttcatttcaaaattctccgtttcaaatgaacctctagacacatacaccatatactaatttaaatactccctaagaaagtaggtgaaagctatgccagctattcttggaaaccttgtcttacaaaccagtaacggttctttcaacttaggtgatttttataacgtttctccaaaagcaaatacaaaatcttataatggctcgggcggttccaatgccgcttttatcgttaataattttaatggtgttagtgcaacgaatacatttgattctgatgttgcagatcaagatcaagtagtagcaaattaggctactactgaataaaacacaacattccgttaataatgtatatacagtttctgattccccttcatacccgaaggcttagcagctagcttttactagctgctctttttatgctttacacgaataaatctctaaatttcaccgatactatatacgactttaaaaagtcagctttaaattcttcccactctagctctcttggtcgagagtcgagcagttagctcttgctagctgctcttttattgaataaatttctaaaaagtgttaacaatataagtacaccaaggttgaatacgaatgaccattgtgttcttcttattcaccagggcagttagcttttgctagctgcttttttgttcttatttttctatttgttacatacatttttaacgtgttcattttgttcactgagttatctcctatctgtagagcaacctgagtggttgctctttataatttttttctgaatagaccttcaaattatgtccatactataaatacacttgagttctgaacttccttcttaatgtttttctgaagagcggttagcttttgctagctgctcttttgtattaaatctaaaatgaaattttgttctcatttccttttcacatcatatatttctaacctgaacgttccgcttaaagagttacctcctttcttaaagagcacttatgcatagtactttttttattttccttatttctacaaaatgaggtttttatcaaaataactttcgtataacatttcaaatctggcttacactataactgtaactttaagttacacatcctaacttgcagggcctaattttcttttgtgtaacaggtggttagctaataaagttgaccactttgttgcgccaaatattttttatttctcaatacttagcacctgaaatgaattctcgtttattgatactatattggtgacattgattttcctcataggcatttttgtaacggacctgttctcccacagcaggtccttttttatttatttactactatagcgtttttgttgattttccgttgatattataaaaaaacttcaccttctaattagacaagcatattgtatagggcaatccagtccatacgttcaatcctgttaatctaaatgcacacttatatgtgtacccttttttatttaaatccactttattatttttattactataaaaatatatagtttcatacgaaatcaataaaaagaatattctattctggataatctacattgggtaatacgattgtgctgggtaataaggttgtaaagaataatatgattgtgctggggtataaggttgtaaagaataatatgattgtgctggggtataaggttgtaaagaataatatgattgtgctggggtataactttgttgcgtgtgctgtgattgcagcgcttgttgttgtgcttgtatagcctgatgaactgcttgaatagtactttgtgcaggccccgatcctcctaaagggcgcatttgcgttttattataaaaaaaatcaaaaaacatcctatattcacctcatcctttaaatattttgtcttccatctttcatactatgaatatttaattacaatggataatacatgacgcttttcaccttataattcttgaatctctttctattcaaataactaactattttgtttcaagttttaacaacatatttatgaaaatcattcatatacttttataggtgttgtcattagcgacatggagtgctttggtcacgcactcctgtttttttatgcaaaataactattttgttaagctttatcaattcctacattctcttaataagtcccgtataataatcttttccaaatcattgtgtttctctctgcaatactacttttctaaagaatccaacaaaatttgacaaacatagtcaactatatttgttatgatgttctaggtatttcgcttctaagacttcgtacagtttaaattttgtttaacctatatcaaatattgataactggccttcgatttccactacttccatcacaggttcccccttttgatttgactgaaatgctattctttatccttatactccatctccaaaaattcagctaaattaatctctttcattatcaattcttctagaaagtaaaacgcttcttgttccccttcattttctcttatattttgaaactgtaatttttgttcttcatctaattcaaatttcacctttgcttctacaaccatcattcatcctcctcacctactaaaatgaagtttttattttcattaacttcgcttaaagtgaaatattcattttttcattcaccgaagttcataacatattcttttcctctggtataataatgattaggtgccccatgcgcattttatctactggaaataataccttttacgcacttaactaatagaaacttcatttctactacttctacaataacaattttgttcacttgtttgatacatttatgaaacattcacatgttatcttcaatatgttctattctttttgaaaaaccatgtgagaataccaaaacaagaagccctagagccctaactctagggcttcttgttttcaaataaggattttgttaaatattcaattgaaccttcttacactctccgtattactagcccataagatattcagaaaccgtatgaaattgtaatactaatgtaaggtttctcaatatgagccaatgtatttatgtagtaaactatttatcggcaatacatataaaaggagaaacatttatgacttttgaagacgatcgtaaattaggcattcaacaagggtgtatagtaataacagatcaatcgcaatatcttgtcgttaaaaagaatgaaaattattctttattaagcatcgcatctgcggaatgtataaactttgaagtttcacttgaacatcttgaagaaatggtccaagtagatttaaaagaaaaaattcaagatatcattccaccagagaatattaaaatcgtagctcaaaacagaatataaaatgtattttctaagagcactttcgatggtgctcttttttcatgaacagtttcaaataacgattttattatgtttccaaacttacagtaatgtccttaaaaaacattcatatatatttatcagatgcacttttaaatcccagagtatcaaatgcttttaaaagttaactgaccaacaatattcaacttctctttaaaaataacttagatacaaaaaagctacgttttatataggataaaaaattatcttacgcaaaggagcttgattatttgtgaattaccaaaatgataataaccctaacattcacaaaccttgcacttgtccatcccccacggctaacagtttaaatgttgttcaaactaccccatcaatagtctctgtaaattctgcgattccactagataccgtggtaaattctaatggtacggcaatctcattcacaccaccaacaactgttttacttgaaggtggaagaacctatttggcaatctatgaagtgcaagttatcattcaaccaggaggtaattcggcaggtatcactatgtatcttaataataatccaatcattggctctggtacttctctgggatatactgcaggattcacttctgtatcagcacccgctattttcactacacctttaggtataacaagtactcttactgttaatgtaggaccatattctaatacattaaatacattgggcttaactcttgctgttgtagcattaacataataaaatgtaaaactctctaaaatgattttatttatcccttaactgtctattgggctagcctctaagaactccacataactacatatagaaaaagaacattatttggttccatagtactaggtgactcggctagcacaattgctgagtcacctatttatctataataaaataaagcttttgtttaatttattacttgttcttttttatgcattattctattacaatccattttcatgttataattaccaacagtacatattttaataggcacaacaaattcctattatttctaaatggattaacaaataaaaatacgtgtaaaagaattcagtgttttactgaattctttttatggatctttcaaaatcttttacatcttccttcattccttctttttaataaacttcaaattttattacaataacgcttttttaaaatacaatcgcttgcctataaactttgtaaccttcattttctttcctatgattacaacatcctcctaacaaccaagtattggttatatatcccatatgaacacctctattttattggcatatactttgaaggaaaaaacatttcacattaaacatatacctacaaagtcagttgctaataatttaccaaaaattacttaatattcaatttttaaaaggaggtatttatgagatataatcgaaaatcaaattccaaaaatccgtgtgataaatttcagcaaccctgctttatttctatatccccttgtgatcaaagtaattgctgtacacctgtttttttctcgaattctcaacaacaagaattattacaaataataaatcaattaaatcaagccatcctttcttttttcacaacaccaaatccaacaactatacaaatactccaatcagcattacaggcattaaatgatttattaataacagtacaaccaaatacaccaaatagaaatttagttataagaactataaatcaattaattaattccttacctactgcatccctcactcaaatctcagcattattccaatttctattccaaagcttgtcttcacttataagttgttcaaatatatcggaccccttattacagcaaacattcaacttaattttacaaggaatcttaaatagttcgctattaagtaacatcggaataccggggccgactggagccactggacctagaggatttcctggacctagaggcgctcagggttctcaaggtgtgcaaggaattcaggggccggaaggaccagaaggaccggaaggacctcaaggtgtgcaagggattcagggaccggaagggccggaaggaccggaaggatctcaaggcgtgccagggattcaggggccggaaggaccaccgggacctcaaggacttcaaggcgtacaagggattcaagggcctccgggaccaccgggacctactggttcagggaccggaatgggaattcccggaccaccgggacccactggacctcaaggtgtacaaggaattcaaggaccggaagggccggaaggatccactggacctcagggtgtgccaggtattcaagggccggaaggaccaccgggaaccactggacctcaaggtgtgtcaggtattcaagggccggaaggaccaccgggacctactggacctcaaggtgtgcaaggtattcaaggacctgaaggaccaccaggacctaatggagattgtgattgtccaccgggaccgactggacctaccggacctaccgggccaaccggacctgcatgtaatttcctagtatatgctacaaatgcaggactcatagatgaccctacaaatgatacagtatctgtaattaacaccggaacaaatatagtagttgatacaattactgtaggtaatgcaccacttgaagtaaccgtttcaccaaatggagctcgtgcctatgttactaatattttttctaataccgtttccgttattgatactgctactaatgccgttatcgctaccattcctgttggaactaacccaataggtgtagctgtttctccaaataacacaactgtttatgttggaaatcatggcaataatactgtttctgtcattaatgcggcaacaaacacagttattaataccattcctgttggcatcgctccacaaggaattactgtttccccaaatggtgcccttgcatatgttgcaaacgaattaagcaacacaatttctgtcattaatactgctaccaacacagttattgataccatccctgttggcattcgtcctagaataatcgtgtttacactagatggtactcgtgcgtatgtcacgaatcaaaacagcaatacggtttctgttattaacaccgctaccaatgcagttattaatacaattaacgtaggtaccgaacctgttggcatagatattacaccgggtggaaaccttatttacgttgtaaataaagttagcaataatgtatcggtaataaatgtggcgacaaatactgtgattgatacaatttctgttggtttatcccctgatcaagtagccatcatacctgatggcactcgagcatatgttacaaatcaagctagtaatactgtttccgttattgatattgctacgaatactgttatcactaatgtcccagtaggtgtcgctccaaccggaatagctactggaactatttgtgaataaaataaagaagtgaaagccacagatagtttttattaaaattgatagtatgtgatattctttctttaactacgttcaaacaaccagaataaacctctatattctgttaatattcttttctgttttgtcttacagaacctgcagatcagctagctgttgttagctgatctctttctataaaactcaaatcacataccaattaatttactaacattgaattttttagaatttaataataatattcacctataaaaccattacccttattcaaagagctatgagcctttccactcatgactctttttttttacgattttcacttcacatctacgcgattttgactagcttctcgactaaatccgtctgggtatctttctaaaaataatcattttatcttttcagtaaacttagtatctacacgatcaaccttaccgtttatctaaaccgcgacttgctcaccaaatccgctcattggtggattgactactgtcacattcccgtcctgcactattaaaagtttgttgctactaacatcaatttctacttttttcatatgtccatctaccttttactaccacatgtactcaacaacatcagttttaaaagccacctcccaaataaactcttactggaattactacacgacctagctcgtccacttttcttgaaacacctgttttttcataccttactttcctttagtatttttatatttatttagaatctcatgcaaacgtttcttattaccaatcagttctgcttatcaagatttagatttaattaattgtaataaatcaggtggggggttatgcagaaatgctttcagggaaaagttttataaggaaataaaaaatgcagcagtgaaaaaaattaaaattcgtaatttaagacatccacacgcaactatactattgaaacaaggagttaatcctaaaattatcagtgagagattaggtcatacagacatttcattaactcttaggatttattctcatgttttaccgaacatgcaggaagaaggagtaaaaaattttagtaaaagtatctttggatagctaacgtttgaaaaatgtttgcattttataacaaaaagccaaacaaatcttgtattaacaaggtttattcaccttaacatatgttattatgtataatacatatgttaagtaaattcagaataacgaggcaaatattatggactttgtttatattaatcaaaacgtattaaataatcttctatacattttatgtagtatatttgttttttatttcatatatgatagcgggcgctatttaaagaaatataaaatactactgattaccctttgttctagtatcccgcttattttatgtatgcgataccctatctatatggatgaaagttgtattcatgatttaagacaaattccggtcataataggtacgctttatggtggattccctgtcggtatcatattgtttacaattttattaattacaagatttttattttatggctttaacatgctgaccgttgttgtttacggaataatgttcatcgttacagcactcgcatcttcaaaatttaatacatataatagaaaacttaaagtagctttttccatgtttttaacctttttcctagccatatttacaactttaattgtattaactttatcagattttgaagtgaataatttgtatattatttatttcatggtattaccgactactttgatgttatttattgtttatataaatgaagttataaaagatgctgtattaatgcgctcaaaattaattaaaatggaaaaaatggagattgttagccaactcgctgcaagtatatcgcacgaagtaaggaatcccttaacggttgtaaaaggatttacacagcttttaaaaacaccaaatttaactcctgagtcaagagacgaatatattaaacatatacttgaagagttaaatcgtgcccaagaaattatcgatgattatttaacgtttgccaaacctgctccagaaaaattagatcaaatttcaataaaacaagagttaaatcgggttattaatatgatattgccattgtgtaatatgaatacgatacatattacacaggatttttctgaggcaaccattgttggtaataaacagcactttcaacaatgttttttaaacttaataaagaacagtattgaagcaatgcctaatggtggtaccttaaatatttcctcatctatcaataatagtaaagttgaaatacgaattgaagatagcggagttggaatgtcacaggagcaaatacatcgattcggtgaaccgtattttagtacaaaaacaaaaggaaccggtttaggtacgatggttgctgttaagattattgagacgatgcatggaagtttaaaaattcgaagtatcgttagtaaaggaacgactttaacgattacgttcccgaaatataataagaatacgcattaaaacaaataaaaaaggagcatagtcgctccttttttatttgtttcgatacataagtatcttcaatgtttttttagtttacatttgtgaagactaattaaaaattagtatcctccgccccagcagctgcatcctacaattattaatagaatgaataacacaactagtaaagcaaaacctccaccaaaaccacaagaaccaccgtaactcatattttctcctccttttggtttgaaaactaataggtagttgatcattttaactggttcgtattatacattatgtatatatcccttttttgagcatgtctacataaaaataagtaaaagcactcgtttaaagagtgctttaaaatggataccaaaagttttgaaatacgtttaattttaaatataccgcaacaataaatatgaaaataccggcaaataaagcgatgaaatcttcacgtttcgccttacttgtataaaaccatgtacgtttatccttctttccaaatcctcttaaatccattgcatttgaaaccgtatctattctttctagagaatgaatgattagtggccagaaaattaaaacacggttcttcatacgaacccataaacttgcttctcctttttcaaaagccactcctctcgcttcttgcgcgtgtttaataattttatactcagactggatgtcaggaatataacgtagtgcaatatttattgcataagtaatcttataatgaataccaagtttacttaagctacttacaaattcgcttggatctgtcgtgtaaataaaaagaagtgtaaatggtaataacgtaaaatactttaatgaaagtgtagctgcataaaataatgtttcatatgtaatcgttgcatatccaacatgtaaaaacgcggtatatgattcagttaattcagatccatgagttggtgtaatcaataaaatcatgacagagtttaataaactaaatgtaaatatgacactaaaaacaattaaaattttacgaaatggaattttagcaatgctgagcccgatacacccaataataaataatattagcaacacccgaaaatcaaaaaacaaaaaagtaagcgtcatacaaaaaataaataaaaacaatttcactatcccatccatacgatgaaaatatgtactatgcaccttcctccctcctattactgtctaaataaagctccataaatttttctggacatgcaatcccactaaatttaacaagcttggttaaagaactctctcttaagttggctctttgtaacgtttcttgatcgcctaatacatcaaacactgtattatccgcaataattttcccttcatgtagaactactgcacggtctgtatattctagcgcgagattcatatcgtgagtgataaaaacaaatgaaattccctttttagctaggtttttaataaaagacataaattgtttatagtgataataatcttgtcccgctgtcggttcatctaatatgataagtttaggatttgttgttaatacagatgcgattgttaatctctttttttgcccatagcttagtgcttgaattggccaattacgaaatggatataaaccacaaatttttaaagttccttctactctattcttaatttcttccttagaaaaattatgtaatgttaatgtaaatgaaacttcttcaaaaacagtaggctgtgtaatcatatgatttggattttgcatcacgtaagatatgatttccccacgtttacgaatagaccaagaactaatatcttcaccttttaacaagattttcccatttttcattttgtttatgcctataagactatgagctaatgttgatttccctgctccattatgtcctaacagtgccacaatttctccttcatatattgaaaggtttacattttctaatactttttgtttattagagtatgaaaatgataaattctccactttaagtaattccttgtttttagtattcccttttaatatgacttgtttctccatccactcttttataacgttgcttaccttttctttttgaaggttttccattggatatattacgtcattattactatcaaaatgtaatctctttaatgcttcgatgtaaataggctctcttaagccgatacgtggtaatatatttgacgctaagatttcttttggtgttcctatcgcaatgactttaccttcatcaattaatataactttgtctaaatccaggtttaaaatttcttctattctatgttcgataataacaatcgttttattatattgttcatgtatatctttcataagttttatcgtatgtaaggcgcttagtggatctaaattagctaacggttcatcgaacaataatatatccgcatttgttgttaataaacccgctagagaaactgtttgcttttgacctcctgataattcatatggactttgtttatgaaacgtatgcatcttcacctttcttaatgagtccgaaacaatctttttcatgtcatcttgctttacacattcattttctaaataaaaagctacatcttcctctactgtcagaccaataaattgagcatcttgatcttgcaaaattgttcctacctgtttactttgttcaaaaatacttccttccctcggatctttaccggcaattaaaacgttacctgtactattcccttcgtaagaaaatgggattagcccatttatacaatgagctaatgtcgactttcctgagccacttcgtccagcaattagcactttttccccagggtatatatgaaaggtaatatcacttaaagtaggctgcacagcatgcccatattgaaaggtgaattgttcaaacgaaataattggttgcatgttaacatccctacttttcaatttttaaatgtgtatgtttcttattggatttcgccaaaccaattgtaagtggcaatccaagtactaagaaaacgatgacatcggaaattgttgctcctaatacttgtataacaattttgtcaaatggttctcccatcacaataatatcgaatgccccagcaaatataatagcaatgacaataccaactagcccagtaattgctaaataagaaatatcccccttgttaaatgacccgtttttcacactaaaaccaactcttttttgaataagccccattgaaaaaccaataatacctgaactaataacccagccccaccaaataccccagccagcaatcgtatctgttacggtatgaccgataagtccgattaacagtcctgccactggaccaaataatgctccaaaaacagttaatatagctaatgctggtttaataaatgtattcggtgcaatggaaaatccccaaagtcctaatatcccgtataatgctgctccaataccgattgctactactaactttgttgataatttgttcatgacaattcccctctcatattagtcaacttttattactctatatttaatttaaaaatgaattatgcatcgacactccctttctatacaacaaaaaaatgacctcttacataagaggtcattttctttcacattcaagaatcctcttatctttcaaaaaacacatcgtgtcctctgcggaattagcaccttcctataaaattgcataggggttgctgaggtttcttagggccgttccctccacctctctggataagtattaatttgtaattcgtattatggcactaaaaagtataaatttcaatacttttctcactatttttattttttattaaatagatcatttaaatcattgtattcttatcggaattgtgaaataataaattcaaaatcgtttcgggaggaatgcattatgaaagttattggtttgattggaggattaagttgggaatctacatcattatactataaacatattaatacacttacactctctcaatacgatcaaaatgcaaagttagttttatatagtatggactttggtgaagtaactactttattacaaaaccatcaatatgaagaagtgaaaaatgaactagttacagttgcaaagaaagttgaaaaatctggggctgaatgtttattaatgtgttcaaataccgtacatctatttgccgaagaagtagaacaagcaatatctatcccgcttcttcacattggtgatgtaagtgctaaagaaatggtagaacagagtataaaacgtatcggactattaggaacaaaacaaacgatggagcaagatttctataaatcacgattagcgaaatataacattgagacaattatcccaaatgaagaggaaagaacctttatccaccatgtcatattagatgaattaagtagagggatcatttcagaaacatctaaagaaaagttattacaaattacaaaatcattaattcaaaacggcgctgaaggtatattattaggctgtactgaaatacctttacttatctcccaaaatgatcttactgttcccgtttttgatactgcttttttacacgcaaatactgctgtgcaatttgctggataagaatatacaagcataaaggtgagaacctctatgcttgtatacagttacgactatttatcccgctatttatgggtagtaaaatccctactgattaaaattttactttatttaaaagagattcaataactgcaattgcttcttttgaaccaccacattttaaaaagctatcattaagttttcttataccatgtttatacttttcatttgaaagaacatctgttacggcctcttttaaagtgtgcacattaacatgttctttcaatagtctatgtgccgcttcaagctcagttaatctttgcgctatcattggctggtctttatcatgcggtattattacaaatgggacattataatgaatggcatcgtgtacgctattcataccaccatgtgtaataaaaacatctgcttcatttaatatttctgattgaggtacgtatggagcaattataaaattatctggtgctttcttaattttagaaatatcatttctatcaccaattgccattacaactatcccatcaaaatctgaaaaagtatcaatacaagtattaaagaatggttcgagtccttcaagcagtgttcccattgaaatataaataactttcttttctttaagtgattccagtggaaactttatatttgttttacgctttgaaatactcggtccaataaaaatgttattttctccgaacgattcgttattaggttggaaatagcgacttgtgtatacgagacaaacatcacccttattattcataaattgaagattattctttggttttactccaaatttatgttccatctgatttagtaatttttcagagatttcctctggttggaatggcatatctgcatttggatgaaaaggtaatgtcttcaaaaattctggcggaattaaaaatataggtgaggacactacacttggaacttgtaaatactcttttactaactctcctgcgccaaatatatcataaattacgaaatcaaaatttatactttcacataattgtttcgtaatttctaatatatataaagaagtttgaacatgcacatgaaaaaaagcatttaacccagatgaggtttcagcatcaatagaaatctcttttaatagatccggatgagtatgtacagtagctcctaaatcttcaattctatccttaaagtttgccgttgtaatataatgtacattatctcctcgttcagtaaaggcttttactaaatttaatgtaggatttacatgtccctctgctggaaaattaaccactaaaatatttagcacttattcctcactccttacatttcattgttttaattaagcatactgttatttgtacaagtaatcttcccctaatagtcctaatatgcttgctacattatattgataaataattttcagtcatcaacataaaaaaaagcatctacctatgtagatgcctaaccgtgataaggagtgttctgtgaggttagaacaagcttttctgcttgtcctatgctattaatatatgattgattttataaaacgtgaatagttaatagaattattttatccattttatatgatcaaatggataaaataccatttctactttacctattatatttgactcatcaataagtccaagtgtattcctactatctttactatgattacgattatcacctaacacaaataatttatgcgtaggaacttttatttctctaaaatttgaaaaacgattggatacttgtgacatatctaaatgtatatacgactcatcacgctttttaccgttaataaatacctcatccttttttagttgtatattatcccccgataatccaataattcgtttcacatagtaagtaggctcgtcttctttttttataatgacaacatctccatgatgaaaagacgataaacagacgtttaccttattaacaagtatataatctttttcattcaaagtaggttgcatcgaaatcccttctaccatacaaaataaaaaggacttattaataaaaataacccctattataattaatatgtaactacatatgttcctccaatattttagaataaacagcttcatatacacctcatttctaatctattcccagataaaaacgcctctagtttacagacatgctagagacgtttcgtacattttaattctctttagaggcatctgtttttggcgcttcaccagttactcgcttatttttcaaatcaaaataagcatctaaaacttcttttccaatatcggagttaatgcccgatttatcattttcaacccacggtactacaacagaaaatgctacttctggatcatcatatggcgcatatccagctaatgttaagttataacattctctacgatcgcctttcgcatttcgcccaatttcattttctccaccatatacagtttgtgcggtccctgttttaccagctggtttatatggtgctttttggaacgctcttactcctgttccatctccttcttgaaatacttttctaaatccttcttttacttgattaatatgttcttgtttcatatcgattctatttaaaacaacgggttctattgattgtactactttaccaacctcatctttttgaacggtttgttctctaatctcttgaacaatttgtggtttcattcgataccctccatttgcgatagtcgaaatatattgtgcaagctgaagtggtgtatatgtatcatattgtccaatagaataatctaataagaaaccaggctgattatcttttcttccaatttgccctgcagtctcattcggtaaatcaataccagtttgtacgcctagtccaaattgcctgaaataatatctcattttatcaaaatattcttgtttaatatctagtgaactatttttcacataatccacaccagcaatttttaatgcgatattaaacatataaacgtttgaagaaacttgtaacgctcttagatcgtctatatcaccaaaatttttccaagacttcttttccttagttcctttaaacttcataggtgcatcataaaaatgtgttccaggagttattgcatttgtttcaaaccctgttaacactgttgcacctttaaccgttgatccaagctcatatgaacttgtcagcgtgcctaaagcataatcttctacttccattttcccatctttttctacaagtcttttcccagccattgataatacttggccatttttaggattcatcatcactacgaaagcacggtctaacattgattctgaccctttatattgttttaatattttttctatgctctcctctacttttttttgcaattccatatctattgttaaagttaaatttttaccgctttttccttccgaaaccgtttccgttctaatagtatttccttgtttatcagcaatgcttcttacttctttttttgtaccatgaagtacatcttcgtattgctgttcgatataacttttgccgaccctatcatttcggctataatcacgcactaaataataatctaatcgttcacgtggcaatccttcatcagcatttgagacgttaccaaggacagaacggaataatccatcatttacatagattctctcccaatcaactgatgcgtctactcctggaaggttcgctaaattttcactaatcaccgcatattcctgttcactaacgtcctttttaataatttgaggtgccatttgaaaacctgaggtcattttacttttaatagctaacacttctatatctttagccgttagttcttgaagatttttatctgtaacgcgtttcctttttaaatcttctatttttttgtctagctcttttccggtaatatccttatctcggaacttatctatttctttttttgatactaagtcttgagcaagttctggatttaattgcatccaaaagtctttcttatcagtctccgttaacttatctatatcttcttgtggcatttcaataatatctgcaagttgtcttgctgattttaatatttcttcttgttttacacctttcacctttgtatatgtaatcgtacgtaaagacttattatcaactactggatttccttcacgatcaaatattttcccacgtggtacagaaaggcccacggttgcattttctctcttctctacttcatttttatatgtttctccatcaaaaatttgcactttccctaactgaataataatgccagaaaataataaaaatacacaaaggaataaaatatttaaccggagaggtactactctaccacttttcttctcttgctttttcaccttgtcataatctcctccttacaatatttcaaataataatcacatttctatattaaaagtaatgtacaatttctatacattgctttgtacaaatattaatataatgtttaaaacttaatagaaattaaaacaaaggtaaagaaaaggtaaagtttactaaattaaatataaaaaatacccaataacaaaaagcttagttttcactaatcgctttgttattgggtattaattgatttaagaattactactagtgcgtattgctatacatttgtcgtcacaattagaaagagattgtttacttagtactttcggtaagtaaatagttactgttgtcccgacaccaacctcgctcatgatactaattgtcccttgatgactttcaataattttataacttaacattaatccaataccagtccctttttctttcgtactataaaaaggttcacctaatctcttaattctttcttcaggtattcctattccttcatctattacatgaatgatgacaccatcatcatttatttcttttatgtgaattgaaatttccccaccatttggcatagcttcgattgaattttgcaaaatattaataaatacttgtttcaattgattttctgagcattcaataattatatctttgtcatccgtaaatagttcaacttgaatatttgtcataattgcttttgtattcattaacgatacgacatttttaaaaatttgataaatatttttcttttctgtatttatctcatctgttttagcaattgccagaaattcttgcaggatcgcttctatcctttcaatttcagagagcataagatcaaaatatttttcttgatcttctttattaatttgaaataactgtataaaacctttaattacagttaaaggatttcttacttcatgagccacgccagctgctaattgaccaattgctgcaagcgtatctgatttatttagcaattcttctgtcttttttctctctgtaatgtcgcgtacaataatcataattttatcatgtaataatggtaagcacctagcctcaaagaaattaatacttccattaagtgtgagtggatattctacaattacattcgttcctttttccttcacttgattaatggcttcctgaaactgctgtgctactgaagatggtaatacttcgtaaaacttttttcccataaaagcttctgcgggtacgtaaaactttgtaggagatcctgccttgtaatctataattgtgccatcatcttctgttaagaaacataaatctggtaaagctttaaaaattaattccagttcagatgtttgttgttttaactgctcttctatcgcttttaaatgtgtaatatctacaccaacagcccaataactatatcctgttacaggaaactgttctgatatattcgaccacattattgttttgatttcaccatttttacatgttaagtgcatttcccaatctctgaaattttttccacaagttaaaaatttcttttgtatttgatggcgataattataatcaggatacagtaattgcagtgcgttgggatttccaattatttcttcagcggtataacctgttacaatttcacattctcgattccacaaaacaaaatctccattataatcaagcgcatcgaccataacaggcatgttttgtaaaatcgtatgtagttcctcctctttccgagaaagcaacgttgtatttttactttgaaatacttttattgcgccatctaaaattaaacttgagagcatttcaaagtatttttgacaactgaaaatttcgctttttttggaccatacaacaaaagatcctaaatgttgattgtataagaaaatggggatttcaatctttggaagtttactcttttttatctcattcattccgaatgaaaaaacacactctttttcagcatcaagaagctgatgtgatatgttagttaatttataaaattgttctgccatggtttctattgtactcacatcaataagttccattagccgcgaattcattcctttttcacctcaatatgtaaaattaatacaaatctaaaattcatacttctccattatacgaagaaagctagtgaaggtatatagctgtagaataattattcgaacaaattttatttttcaattaaaataagaaaagaatatatatactgaatatacctttaattagtatatatttcgttgattcctcacttattgtctaggtaacttgaattccttcttacaattcactgaattttcacttgagagtcatacacgttactaatagcggtataaacatgcaataagtataaagttcataaaatattcacaatttttatgaaaaatataaacatttattccaatatattctatataataaaatgtaataaggcttctatgaatctcatagaataccttacccctaataaaaaagaaaaaagaatccatttggattcttttttcttttttaattacattacatatttatataaagcatgtgccacaccatgttcttcatttgataacgtttcgtatttacacattgcttttatttcttctactgcattccccattgcaattgatatgttcgctttttccatcatagaaacatcgtttagcccatcacctatcgctacagtgttttcaaccggaatattaagatgttctgctaaagtatataatccattccctttttgagcatctcgatgattaatctctaaattgtgccaatatgaagatgtaattgctaaatctgtattatgaagaaatgtttctttgagtttttttaatttctcaatttcataagaaaatggtaatagtttatgcacatgtatatctgtttctacaattggtttacaactttccgcactatgaaacgctgtatgctcaagatataatgctgcgattgtttctaactctttcaagtcgaaattttcttttgaattcttcacatgctcaatttcattacgtacactctctactccataatccggtacatacacacctttatcggtatagagctgataatataaaccattctcttcaaggtattctacaatttcaagtgcctgcatattttgaattggatatctcttcatcatttttttatctttatatataagagcaccattttccgcaatgattggacactctaaatcaacttctaacaataatcgctcaatgtcaacaattgaacgtcctgtacaaattgctacaacatggccagcttcttgacatgttcgaattgcttctgcattttctttacttatcattttattccccgaaagaagagttccatctaaatcaattgcgattaatttcattatttcttcaccactttctataaatacacgagttctaattaattattaggtatcgttttcatacaatcctcgtgaggtacttcttatttataatttatgaaaagcgtttcaggtcaagaaataattaaaaataaaatccaaagcttttctttttaaaaaagctttggattttaaactatgaattataactaatgtattttgtctcacacatgtacacatttttttcttcagttggtatatatactttaaacttttctaaccgttttccatagacatgaatcgtaataacgctttcatttttgctaatttcaagaatatgacaatccgctggtggaattactttatctgtttctccttctcccaaataaagatttcctgtatgtgttaaataaacaagtgaatttccaagttgtttcgtttgtataaagttctgcaccataatccttcctgaaaaaacgccttctactccccatgtgccgtcatgatcatgtaaaggtgtagattgtccatctttccatacgagagctagtacttcaaaacgtttgagcggatcttcatacaataaatgtcgtgcatattgagtcaaattggccttctgtttatctaacggaagccatgttttcttttctaaaagttcttctagtaacttttcaatgccacacactatttcttcttcaaataaaccgttttccataagatctgtaacacctttaataaacttttgaaatgatttacttccattacaagtcaacataagaatcctcctctacgttttatacaattccatattaaggtgattaccgaaaactcacaattgagaaacaaaaaacaagatgcaaatgtatgcaccttgttaagatttttatttagctttcaatcgaataggtaagtattttaatgtttgttcattttccaatatacatttttctaaacagaaagatggagatagctctattttttcaaaagcatttataaaggtagttaatgcaatctcagcctctaaacgtgcaagtggtgctcctaagcaaaagtgaggacctttcccaaaggttaaatgcttttcatttcctgttcgatgtacattaaattgagaggcttgtgaaaattttttctcgtctaaattcgctgcactaacccacgcaacaatcatctgatcctttttcattaaagaaccaaatatatttgtatcctctgtaatcctccgggctaatgtaacaggaaagcgatagcgtaatacttcctcaatcgcttttgaaattaagttaggttcttttcttaactcttcataaattccaggtgaatctactaaaaagcaataaaagctattaataattaaatttgtagtggtttcattcccagctgctagtaaacctaatgaaaaggttacaatttcttcatcggttaatctttcgtcttcatattcagctcgaattaaatcagaaatgatatcatcggttaaatgatatctcttttcctgaacaatcggtagaaggtatgctttgaattcatttaatgctatccctttctcagcatccagatcattaaacttttctttactatacggcataaataaaatatcagaccattctttaatttttttacgatctgttgttgggactcctaataaatcagaaataacggtaacaggtaaaggtgcagcaaactgttcaacgatattaacttcactacatttttcgatatgttgtacaagttcatctgcgatagcctgtattcgaggtttccactgttctaaacttcttggagtaaatgccttagaaacaatggaacgtacattgcgatgttctggtggatctgtagagtttatatttattctagtttctaaaggagggattgagaattgtctgcgctcccttctacttgaaaataagcgataatctgataaaacacgatttacatcatcatataaaaaaacattccatacatcctgctcttcatcataatgaactgggtgattatccctcatcaaacgataccattcatatggattccataattcttcttttgttttcagctttgaaatttcatgaactaaaataacattttcaggtgaagccatagttctttcctcccttttcttttacaataaaagtgataggtcggcagttcaaagttgtataaactatcatatgttattttaacatatactaaaggggatttttcattagagaacttgagaaatatataagggggatttttatgtacgttgatattttactactagcagaattaacgaccggaccaaaacatggatatgaaatcaaaaaaaatgttcaaaatcgtttaggtgagaattttgaattaaatcacaacatgctttaccctgcccttcggcgctttgaaaatatgggtgctataacgaaaaaaatacataaacaagttggaaaaccaaaccgaaatatgtacgatataacagaaacaggagaagaaattttttctgaaatgttacgagagtttcccgaaaaacttgcgacaaataatgcagaatttcttgttcgtatcgcgctatttgaaaaacttgaatatgaagctagaaaagagattttgactgtacgtcaaaacgtactacatagtcaacttaccgctattcagtctctagaggttacctcagcctttattactgaagtcattgaatttagtaaatcacgaattgaacatgaattgagttggattacatcacttatgaagaaaatatgaaaaaataacaaaaaaagctaaaattaatgaatgaaaatgatatttattatcaatactatcattaataaaagggcaaccacgatttggctacccttaaagaatttacacttctggatcaaatgttttgcaatctgtttcttccgttgtagatgcatgtttacctttatgacttactacgtaaattgcctctgcactacatttattaccgttcgcccaaaatttacagttgtttacttcacataaaacgtcttgtgccatagtatcacacctccttgttctattatcattaacaaaattcggaggtatgatactatttgtcatccatttttcattccctttttagctttcttaatggttcaatatctccgcgtacaatagcatcaatatttccagttattttttcaatatcaaaatgccaccattgaatttgcaataattcttgaattatttcatttgaaaatctctcttttattttatttgcagggtttccaccaacaattgtatatggtgcgacgtctctagtcacaacagatttagctgcaatgattgcaccatcccctatttttattccgggcataattgttgtatccataccaatccaaacgtcatttcctataactgtatcacctttataaggtaaatcagacaaactaggtgtatacttctcccacccatttccaaatatattaaatggatatgccgaaaatccatccatccgatgattggctccgttcataataaagttaactccagatgcaatacaacaaaactttccaatagtaaggcgatctccaagaaattcataatgatgtaatactcgatcttcaaatgtttctccatctttcgcatcataataagaatagtcaccaacaagtatattaggttttgttattatattttttataaattgaacgttttgattgccttcaatagggtatttaacatttggattaggattcattttgtatagcacttcctttaccacttatttcactttctaccgctattactggctttaaattgtatataggtaaaataaacaataatccaattataaaaagtaaagccgtcccttcatacatcatacttaatgaaaacatctcttttaatgagccagctatactcatcgttactaccattgaaccggtaaaaagcggacttaaaataccatttacacgacctataaaatcggtatcgctattttgaataataagcgtattaataccaatttggatacaaggaagagctaaaccactaaaaagctgcgctgtaagtgtcacccataaatttgtagaatatcctataatgccaataccaattgcttgaccaagcataccgataattaacatcttttgcggagcaacgtttttcgcaaataccattgctaatgctccgccaacaatcattcccgcaccatttactgttagtagccactgtaaactctcttttgataatcctaactgctcagtcacaataaatatacctaatggctgaattaatcctatacctagtcctgcagccataaaacaaagccctagcaaagttaatgcttttttctttttgacatacttaataccatccttcatctcctgcaacagagtgatatccttcttttctacgtcgttttcaagatctttcggaaggaataacaatacaactgccgcaagtaaaaacgaaatacctgttatgatgattgaaatataaattccaaaactatgaaagataaatgtccctagtattggtcctaataccataaatattgcaaatatcgtttgatatatagacattgctaattgaatttgttccgttgataaatgttgtttaaacaacttcattccagatggttgtgaaaactgtgaaaggattgcagagatgagtgtcacaaaaaacacaattttccacgttccaaacataagcgtaattaatacagcgaatactgaaatggaacttaacgtttcacaccatatcattgtcttctttggcttccacctatcagcaaaagtaccgccaataaatgaaaaaataaaaattggagcgaattcagcaactgaaatcatcgaaatagcaaaagcatcaccttttgtcatttccattacatatagtaataccgcaaagtttcgaacccatattcctatttgtaaaaataatgctgatgctaaaatcccttgaacaaaccgattttttaatacttgtgataccccattgttttgtttcgttactacatttgtcgacataaaaaagcctcctatttcatgttctgaacaggaggcagcacaaatcatataaaaagactatatattcgcagagcgaaatacatcccttttctataaatgtacagactaaccctattcagaagaatatttcgttttttaacgaagatctcttacaaatagaattagttgatcattgggatgttttcacccttccgtttcgaatttaaataacacatacatactctatgtaaatcattttcgatgtatgcatgtctccttttaactattctagaaagttaaaggcaattcctctaaagaacgcattaaatagttaccttgccatttaatttcttcacgattcccttttatttgtagttcaggcattcgattaaacaaagtagtaatagcaatctttgcttctaacctcgcaagtggagcgcctaaacagaaatggctaccatgaccaaaggcaatatgacgattattttcccgagtaatatcgaatacttctgggttttcaaatacagtttcatcacgatttgcagaagctaaggcaatgacaaccatatctcctttttcgattgttcggtcgtgaatttgaaaaggttccgctgcccatcttgcagttgtaacctcaactggagaataataacgcaatccttcctcaatagccgaatcaattagttttggattatcttttaataactgtaattgatttggattttcaagaagtgctaataccgtatttgtaattaaattcactgtcgtctcgtgtcctgctacaattaatagcattatcattgaatatagttcccgagcgctaagtttatgcccttcactctctgcaagtattaaagcactcactaagtcttcttttggctcttttcgtttaatatcaactaaatattgaagatatgtaataaactcagatagttgtttttcggtctcttttatttcttcaggtgtttctggtgatgcaataacagcatgagaccaaattctaaatttcgcttgatcttcttttggaataccgagcatctcacttattacaataatcggtaatggaaatgaataatcatccacaagatttaatgtaccttttcgctctatatcacttatcaaatcatctgctattttctcaattcttttgtctaattgtgcaatcatcttcggtgtaaaagctttttgaactaaagatcgtaaacgactgtggttaggtggatctgaatttagcatatgtgttgttaagtggtcactattatcaacggaaagatacatgttctttatatcttgagaaaacacatttgtccaatctttttttaaacgattatcttttaaaagtggcagagcatcttcatatctagtaatgagccattctttaccgatttcaacttggtttacaaataatataggttgtttttttcgcgattctttataaatttcatacgcatcttctttaaactgagctgaagctaaattaatgccatcctctatgcttaacccaactttgtttttcattgacattgtattccctcactctcatttgtttttgaaaatcaacccaacatatgcattatactctaataaaaacgtgaaaattgtaaatttttaatcaaaatcttacttcgtatattgaaaaataaaaaagtgagagagtaaaatcgtttcactctcccacttctctttatgcgaagcacataaaattactaatttgttgatagcgataacttactttacgacgacgaccaccttgccacgtgtaacctgacactccatttcttctcacttcagtcgggaagaaccataaatctcttccgaaaggaccaggacgatgtaagcgtaaatagccccatcttcctagacagttacacatccatgatttcatattacctggttgtgctggagaagcaaatgtagacggtaacgacggcgcttgtgacggaggtggtgacgttggagcatcttctgcatcatctggtctgtaatcttcttgttcaatatctctcacttcatttgtaggttcatacccgtagtcatgtggattataatacatcgcttgatcatatggataattttgttggttatacatattaacaaatcaccttcttttcattcattacctttaccattcatatgtgatatgccctctctgggaagcttatgtatagcccaaattcaacttaaaaagctcgtattattaaaaatacgagcctttcaaaaatagaatgtgtttattatttccttaacttcacactataaaaacgcatttcatctaacgaaccttcaaattcaaatacttcttgtttaattaattgtttcaagcgatattctaagaaagtatctccaactaactgttcaacaagaccaagtgcttcaccaattactctaggagctttaaggaactctcgatcagcacccacacttttcgcgcattcaattataaattgatcaaaataatcttcctgtacagaatgcacttcattttctttccaaactcttaaacattctatgctttccgataatctatcccactcattttcaaacttcatgcgcttctcttcagttaaataaggtagctttataaaacttttttggaatagagctaaactttcaggtggtaattctcccgttccacgaatatcatactcttgttttaatatttctctacttgcttcagacgtattaataactcgaatgtttttcttatcctttaattgtgccattacaaaacttaggcctacatgttcatgtgcattatcagccttccaaattgtaataggcgtttcaacaggaatagtatgtagttcttctatagttgctataaatcttgataaatattcttcttcaaaataactatcataagcagttaagttatttattaaccacttctgtcttactagttgcccctcattcgtatgcaacctatatatcggtccaattgaaaagaattccgaaaaagcaacaacactctcttcaaataattcttcttgacttaacatatattttaagcaaccagccgttgaatcatcaaaagcaatatgtacgtgcgtactttcttttacattccctttataagtaggattactcgttaattgtttcggaatatccatcaaatttttaattgtatcttcactatagttttcttctaataagtttaactgtatgagaatactttgaagtaaatctttagcctcatcttcgtacatatcctctacagcatttttaattttatctatcacacaaatccctctattcatttcaaaaataacgtagattatagtgtatcattttagtatagttctttaaagtcaaatccagattgctacagcaatctggattttcaacaaaagctctccttatatttttgaattgctaaatattttactttgaaaatctttgtatctaaatgtataattatataaaaacaaaaatataggagctatatttatggagaaagtacttactaattataaacattacttaaaaaattggagatttatatttatttgcatactacctgctattgccttattcgttactttctatgtcatcttcgaactactgtttcatcaaaatttctacttatctaacttaatttctgctatcatattatttttaatatttattaacgttaaagataaatttaacattaaagactaaagaacactatttcaaaatagccctttattattgcatcctactataaaataagactcgtagtagattttcataaaaaataagagcaccctgcaattggatgctcttatgtgattagaggttttttctgagtattaagtaggacacgaagatcttgtcctactatataatatatgcttgtacttattatttcgtgcatgtattaagaaccatgttcaggtacttaatatatgcatagtcattgctataaaatctactcaaatatttactgtacgattatcatatttataaattaaaaaacatccctaatggatgttttttatctaacattttaagcttccataaacttagccggtacaccaattttttcaactacagaagatatattagtaggattaatcattacattttcaatacatactaatttattttctaatatcccattctctgtagtaataagttctttaaaccgatctaaagtcattgagaatttatgttcacttccaccattcatactaacttttacatacttcatagtgtcaccgcctcgtatgataaagttaggttttttaggaaagggatttacctataaacccgtgagtatctagttatatgagatactatcaaacagtatcactttataagagatgttgaacgcttcgagtcaggggagtctattacacttccaattaattacggcatgattgcggaggaatctgacgatgtattcaccacaccacagaaagacgctgtaacactttatagctcggttgcaatttctattcaatcaatacaagaagttgactttaaagttaaaaatcttcaatttgaccacggtatgttgaagcaggaagttgatactcttaaagaacaacttgaagcagaaaaacttgagaaagtttcaatgaaagctgaaatttatgaattaaaggtattagtacaacaattaataaatgaggaaccaaagcagccataagctgtttttattttgtacaagatagggctttgattcaattcatcaatcaagaggagtgatttcacttctctttttacttttgaggagatgatcagtgtgaaacgaatagtagaccaagcaatttatgaaaagcatgttagccaagaaaataaaaatctagttaaagattttctcattgaaaagaaagcacaagggaaagcggcaagcactttacagcaatacaattgggatttgcgaattattttatttctaatacatcagcacttcgaaaataaaaatttgattgatttaacacgtaaagacatccgaaatttatctattatttttcaggagatgggaatgtctaatgctcgggtgaatggattgataagtgcattgcgttcagctctagaattttgtgcagacgatgatgattataattacgagtttaatgtaggttcaagggtgcgtggtttacctaagaacccaattagagaaattacatttattactgaggaccaaattaattggttaattgatgaattacttgaaaaagaaaaatacatgttagctacgtatttagcgctttcttattacagcgcagctagaaagaatgaggtttaccaggttcaaaaagaagggttaacagaacaatattatacaaatgtggtacgaggaaaacgcggtaagaagtttagattatattacaatcaccgggtgcagaaatgtattcgtttatatataaaacagcgaggtaaggatactattccagatttgtttgtacgtgtttataagaatggtgagagaaaaagattgaacaagagtgtatttaattattggtgcgacatatttgctaagatgctgaacgaaaaggaagggaaggaatttaaaatgaatcctcactgttttcgacatagcagattagataacttgaaagtacaaggcgtaccacttgaaaaactaaaatcactcgccaatcattctgacatctcaactacggagtcttatctaaaagatagaagcgaagaagatattgcagaaatatttggaatggatccaagttactttgcagcataaaaggagtgaagaaatgacaattgaagtaggagtacttatcgcaatcgcgtcagcattgataggatatatgtcttattcactgaatcgctcgaaagagattaagtcagatggtagacaaggggcagaaacaaacgcgaaattggagtacatcagtaaaggagttgatgatattcggattgatttaaaggcaaatgaaaagcaaatgattgtacttggagagcgtattacaagggttgaagagagtgccaaacaagcgcataagcgcttagataatgtagaaaaggagatagattagttatgaatcaatcaaaagaaaatatcaaaaaacgattccgcaactggaaaacatgggttgcggttttttctttgcttggatttttatttacgaaatttggtgtgccagaagctaagagctttttggatgaattagcaccttatttgttgacagtaggtatcgcattggggatttggtctgatcatgatgtaaatagcgaaggagaggataaataatgggttacactgtagatatttcaaaatggaatggtgatattaattggcccgtggcaaaacaatacattgatttcattatcgctcgtgtacaagatggttcgaattatgtagatccattatataaggggtatgtacaagctatgaagcaacatggtattccttttggtaactatgcattttgtcgtttcgtttctgagaatgacgcacgtgtagaagctcgagacttctggaatcgtggagacaagagtgcaacagtctgggtggctgatgtggaagtaaaaacaatggatgatatgagagccggcacgcaagcgtttatcgatgaactacgccgattaggtgctcaaaaagtcggtttatatgttggccatcatatgtatgctccattcggaatggcaaatgtaaaatctgactttgtatggattcctcgatatggcgggaatagaccagcttatccatgtgatatttggcaatacactgaaacaggaagtgttcctggtatcggaaagtgtgatttaaacaaattaattggaagcaagtcgttagattggtttacaaataaatcgtataaacaagaaggagtggagattatcgtgaacaaacataataaggtgattacttatgaatttggtgtaaatttaattccagaaatgattcaaatgatggatacgcttggatacacttcaaaaattgtttctcgtggagatcgtcaggggcttgtttattttgagtcggattatcgtcaaggtagcgagctagataaagcaacagcgtggttagatgctaaaggacttaaatacttttatacaaaagaatagttttatgaacaaaaattagagccgtcaaacgacggcccttttatttcttccattcaacaagagtacgtttgttacatctacgacaaacaaatccctcagctttatgtacaacaggttgttttttgttgcagtttgggcattttacaagttgcttacctaaagctgaatatataaagagcgcagaaaagaatgttaaacctaaacctggtaaaattccaattatggtaaagcataacactactgaaattaataaaccgaaagatccaattaaaaaatatataactctcttcaactgattagctgtagaacttttcttttcttctaattcaataatgaatgattccccatcagctgtttttcgtaactccataaaaccgcccccttaaattaattaaatcataccaatttaagaagaaaattgtaagattctttttctaattacatccagaaatcattttcatctatattttttcctaacttcttcaaacctctaacaatttgagatattgtagagtatttgggtttgtattttgtatcactacataatctagatatagtgcctgtacttaattttgattttttttcaagttcaatttgttgaattccctgcctatctaaccatttcccgaatttactacgcttttttcctaaaccgaacatttaaactcacctcatcaacagaatgaccaattcctcaaatttttaaacttagaaaaaattttgagaaattgtccgagcccaccctaatatgatgtaccaaggtagttaccacggtaagagaagttccagttaccaaagtagctatcaaggtaggaacagatgattttaccatggtaggtatcatggtaagttttagatttctaccacggtagctaccagggttcctatcaaggtaacgctaccatggtaatgagtgtgtgaagcgttactttatctagattttatattctgtttatagaggggcgaaagaaatgaacatcaagatggcagcatcagaagaaatttgtgagtattgtaaatgtttattatccgattggttgttttggagatggaatggaaaaaagtattgctcagagtcttgtgcggaatacgataaaaaataaatgacgaggagtggagtctatgtttacaagaaagcaagtcatcccttttcgttcatttatggatggatcatacaaaatgaaagagcagaaaatacaaagatatcattcattaagtccgttagcatttgttcatatgtcggattctattttaaatacgtatctggcattagggataatgggaacggctttaactggggcagtcatgttagaaagatatcttgtacgaaatgattatgtatcagcggctaaattattatccaatgggattcattatggcgtgaaaattggtggagtgggattcattacctatgtatttgttcgaattgtaattatgttctaggaggcttgtcatgggaatcataaaagaatggcttcataagaggtctttaaagcaccagattattgaggtgttccaaaaggcaggtttatatacggaacatcaaacacgtggagggaaaatcccaatttatccaaaggttcatgctgttttttcttcaaacgaaagcgtgaaatatgtatttactatccccaacggattagatccaaagacaattgaaaagaaatggttttgctttcaacaaatatttggacggaatgtagcaattgagggagatattaaaaagtttgtgctcaatgtatttcattctgattgtggtttgaaacaatacaactacagttataagcaatggcagccattcataaaagaatgccgtcttcctattgtagtagggcgtgaccagtttggaaacatgcttgtttatgatatggtaaaccccaatacaccccatttactcattgcaggagaaacaggtagcggaaaaagtagcatggtacgtgttgtactatctacactcattcaatgcgtgtctcctgataaattatatttgtacctaggcgacttgaaaaattctgaatttcatttcttgcgtagagtaaaacatgtgaaagaagtgtgcatggaagaaattgaaatgaaagtcatgcttcataaggtttggaatgaaatcagggaacgcagaaagctcatggaagaatatgaagtggatcacattgatgagtacaataaattaaatcctgataaacagaaaccctatattctgttagctattgatgaagtagcgatgctacaagatgaaaaagaatgtatgacgacaatagaaaaaatatcggcagttggtcgggcactaggcgtattcctcatgctatctatgcaaagaccagatgcaaaggtgttagatggtaagttaaagctaaatatgacggttagaatgggctttaaatgcgataacacaattaatagtaatattatgggtacatctggatcagaacacttagaacaatctggccaaatgattttaaagttaaatggattaaagaaagtgcaagctccttatttagaacttaataaagcaaagcaaatagttgaaccttaccgtttactcaaagaagatataacgtttcagaattcgctacaacaagaacttcctttgtttggagtgttggaacatgaagagtagagataaagcgattataaaagacttatgccgctttagatgcctatcacgagatgatattatcgatttgcatttccaaggactcaagaaagctgtgaccagttgcaatacggttatgaaacgattaagtcgagatgggagtgtggaagtaaatgtgttacagaaaccatatatctactttccacaaccgagtccgattcgaaaaacaagtcaaaagattccgcacttccttgctattgtgaatgtatataagcaacttcttcagtacgaaaagcctaaattgtttaaagtcgagccgaagtatggtaaagcatatatggagccagacatatttgcaatttggcgacaatctccatttttcatagaagtgcagaattcggtatacagtaagaaagtaatgcaagagaaattaaaccgatatgaattttactttcatagtttggaatggcaacaagaaccatggcaacccaagaaatcgaaatacttcccttctcttctggtaattaccgatagccagtatgacatctcctcttcaaattttcgcatatttcaagctaaatccattcacgatttcatgaatcaaatggttgttaagacataacaagttaaccatcaataaattctttgaaaaaagctagtccattatatttatttgccttacgatttgcaaggttatgtatctctctaaagctatcaatgtagttatagacgatttttttgaacgttcgagtaaagtatccaataggatttttcatcgattttccattatgctcgtacttatgtgttttaaagtacaaaacagaagaagcatttgcaagaagggtgtgaaatacatctgtatctgctaataaattaaattgttttgcagccttctttgcaatgtttctggcatttttgaaagattcattaatcacattgggtgaaaaagcagtttgtaattccatacgcatagattgtggcacacgataatcgatgaagtctaaatcatgttgaaaagattgcgaaacttcttctttacgtttatttatatcttttatcttttgttttaaggtttttgtagttgttttcttggtgtgacaaatttccacagttttagtaggggcttctgtgacaagttgttcttccgtaataattggctgaataatgattatattactcgtttgtctcatgtcactcttacgtttcatttccagttgcttaataatgccaagtgattctaagtagtggcatgcacggataacagttctacggctaatatcaagatcttcggcaatgtgttttttcgttctgaaagatacaccaagaaatttagaagaataattgtgtaatttatttaatacagctaattgatttttatttaattggtcagcaaattgctttttatatgcacgtacagtgtcatttaattccttgagagtttgaaaagatactaagttttcgtatgtttctgtactagcaagaatagtaattgcttgtttctttttcataagggctcgtctcctttaaaagtaaaaaagcaacagtatgccacaaaatgtaagcaaactgttgcggaggaacccttatgtacgataaaataaggtacataaagagttacagcaagtgtttgcctagttacgttaggcggacggttaataaagtgttccaccactttattaacacgctgtgctcttttatttttttattagtttaatttctattttttcggtaacgaatatggtcacaaacaaccagaaaagtgttgccatttatattttttgatgtagcgtaaaactgcttaatatagatgttttgtgcgctttttggaaattaaagttttatatatcaatgattactctgatcattatccagtagaggcgactatttctatgaagtagtttcaaaaagtttcttcgtaaagaagaaactttttttatttgcaaacaggaaaatcacactttctttccaatatgtataagacatattgagaagaggagagaaaaatgtggatcgaggaatttttaaagaagttccattaccgtgtgcatttttggatgaagtggctttagatagaaatattcaatcgattatagagttaagtggaaataaaaagattcgtatagcgagtaaatcgttacgctctgttccgattatgcaaaagatactagctgcaaatgatcgatttcaaggtattatgtgcttttcacctagagagattttatttttaatagaacaaggatttaatgatttattgcttggatatcctgcttacgatgaaagagctctgtatgaaattagtttgttaacaaagaaaggtttcattataacttgtatggtggattgtgaagagcatattgtgtatttagaaaacattgctgagcaatctaaaggatgttttcgtgtttgtttggatattgatatgagtagtcgcttctttcaatttcattttggtgtacaaaggtccccagtaaaaaatgtgcaggatgcgttgaaagtagtagaaaaggtgagaaggtcatcatatttaatgttagatggtgtaatgggatatgaagctcaaattgccggggtgggcgattatataccgaatcaatggttgaaaagtaaagtgatttcgtatttaaagcagaaatcagtgctagaagttaaagaaagaagagaacatattgtaaaagcaatacaaaacattggtattgagctaaggtttgtaaatggaggcggaacaggaagcataaaaataaccgagaaagataattcagtttcagagattacaataggttctgctttttattctccgaagctgtttgattattataaagaggtgaaatttcatccagcggtcggatttgccttaccagttgtacgtaaaccagtcccgtttatttacacttgcctaggtggtggatatattgcttcaggagcagttggaaaagataaagagcctgaagtttggagaccgaagggtgcaaaattattagctttagaaggtgctggcgaggtacaaacgccaattttttataacggcgaggaacgagtggatataggagagaccattttgtttcgtcatagtaaggctggtgaattatgtgaacgctttccttttttgtatcgtgttaaaaaaggagagattgtcggggagtattcaacatatcggggggatggccaatgctttctataaagggacaaaagtggagaaattggacagggaatgtagaaggaacgccgcattatacgatgtatccagaaagtatacaagatgtagtagaagttgtggggcttgcgcgaaaaaagggaaagaaaattcgtgttgtcggttcaggacactcgtttaccccccttgtgcaaacggaagaagttttagtttctttagatgaattgaagggtattgtgaatattgatgcagagaagatggttgctgaagtatgggcaggaacaaagttatatgatttagggaagttacttgaggaaaaaggttatgcgcaagaaaatttaggggatattgattcgcaatctattgcaggagcgattagtacggggactcatggaacaggtattacctttgggagtttatcaacacaagttatagagattacggcagttctatctaatggtgagagtatagtttgttcggaagctgagaacgtagaatattggagagcgtttcagttgtcacttggaatgttaggtatcattgtaaagataaaattgaaggttattccagcgtattcactcgtttatgaaagtgaaaaacagtcattatccactgtaatgaacaaactagaagaatataagaagcatcgtcattttgaatttttcgtttttccttattctgatgaagtacaagtgaaacttacgaacgaaacaacgaataaaggcagtgatttgaaatggcataaactaaaggtggagttacttgaaaataggatgttctctttactatctaaaggatgtaaatggtttccttctataagtaaaggcgtgagtcggttatcagctaaagctgtaccaaacacaaaaataattggcccgagctatgaagtatttgctacatcacgtacggtgccattttatgaaatggagtatagcattccttcaaagtatatgaggacggttgtagaagaaatctcaaatcttattgaaaagaaaaagtataaggtgcacttcccaatcgaatgccgttatgtgaaaggggatgatatatggcttagtccggcctatggaagagattcagcatatatcgctgttcatatgtataaaggtatgaaatatgctgcttactttggcgaagtggaaaagatttttctaaagtatgaagggcgtccacattgggggaaaatgcatacattatcatatgagcaattacaatatatatatccagaatttcattcgtttttacaggtgaggaaatctctagatgaacttggaatgttttttaatccttatgcagaaaagttatttatcccgctatttgtcgggcagtaacactctcgtcgcaaaattcggtgggagataaccgcccggttggtgagggctaattaaagtttcacattatgtatatgaaaaaggtgacaaataattatttgtcacctttttttagtgtaattgcatttcttgtatgactaatatgttcataaaatagtagtttatcacggctaaatacatgcagtaaaacatgaataataaataggccgttaatgatgaataggaataataatgtaacgagtaatactaaaggctctgtgtgatttaaaatagagctactagaaagaatataattgattccacctaatgcaaaataaaatataccgtaacgaataaatagttcttttaatgtaatacgatttgattttcctttcacgtgaatgcgaagcaatgctttcccaattgtttttccgttagtaaagtatggaataataataaagtaaataaggattgaacacgtaatgaaaatgagttcatacatattggtgtaagattgcatattagaaacgaagaaagaatttcctttgtttttaacgacaggtacgacgatagataagaaaatccaatcaatttgcatcgcgataaggcgacgaatgaatccgactggtttcgtttccaaatcaatatgactatctaactcgtttgtcttcggaaggaagtacgtaaatattggtgcaatgataaaaccaattacgccacctaatgtatttaaaaacaaatcatcgatatcaaataatcggtatgcacaattgtatataccgtataatccagtcacttgtgttagctcgaaaaatagtgaaaggaaaaaggaaatgcaaattgtttgtaagaaactacgtcggaaataataacgtaagtaaataccgaatggaacagttaatagaacgttaaaggcaacttgtaaaaacgcagactcttttaataagtagaaataagtagctggtttcgttaaaactgccgatgtatgactactaatctcttgtatgaaataaaatggtgcgagttgcatgtgttgtgtattagccggttgtaggctacaagtatcaaacgtttgtggcaacggcaaaataacaagaaaataggcatttaataagtaaagtaataatgagtataaaataaatgagcgccatttatttaaataaccgtattttcgataattaaatattaaaaaagggattaaaagaaacattgctaaaaaaggaaataaaataaatgctgttttcactggaaataaatatgcagtcaaagtaaaactcctttcaataaaaattcgtttatcattatagcgctaaaaatatttaaatacaaagttaaaacctttcgaaatagaaaaaattactaatttgatagggattaagttataataaatttaatataaggatattgtgattatataagttgagagagggtacaagagatgcgatatgaacttttttctgtaagtggggatcatattacgacttttgaaagtgcatggcgttttcaggagggagaacagatttttgttcatgatgatcaaacaaaacgaaactttattattattcggctgacgcatgatgtatttcaacaaaataaacatgttattcgtttgtattgtcaagagaagaaagtgtatgcataagagaagccctcttacagtatgaaaagtaagagggtccttatctcgttatttgtgaacagcccaattgatgagggctgattaatttaactttatcattttggccctcgtaaggaataaaaagagaaggattaatgcacataggtagcatttgatttggaagaaaggatatagccttgtattttgtgcttcaaagtttcattgccttctttttgagaaagccatgtatggtaatcttgttgtgttttccataacatacgaatcatatactctgccttatcatttgtacgatgaacaggtgaaaactctatgttaatacaaccgttcgttccgggggaaggataatattgtttaagcccataaagtagctcattttcatattcgtacttaatgtgaatgagtttagtaactataaacatataaacacctcttttacgataatagtaggaaagatagaattactgtaatagtgaacttgataaatattatactattctgaaaattataagtaaataataggttttaacttaataaaggtataaaaaagcgagtcattctattacactagatgactcgcttttaatttgtaagttttactttataagaaaataagagtaagtacacctacgataatacaatagaaagagaaatattttaaatttccttttgccataatgttcataaaccattttagtgaaatatacgtcatgataaatgttgcgatgaatgcaacgacatatggtacgaataatgtgtctagatttggatcatttgcaatgtctgtaatgcttaacaataagccacctaagctaacaggaatgtatagtaagaatgagaagcgaagagctgtttcttgcttcataccaagtaacattgctgctacgattgtggcaccagatcggcttattccgggaatcagtgcgcaagcttgtgctaatccgacgatgattgcatctttcatagaaaggtcgccatcatttttacgaccgcgtaaatttctaataatccaaaggccgacagcagtaataagaagggaaatcccaaccatcttcacaccttttaagtactgatcgatgtaatctttaaataaaacaccaataacacctgctggaatggttgcaataacaagataaataataaagaagaaatctgattttgcgtcttctgctcttgtaaatatataagagagaccattcttcgttagacgaattaaatcatttctataaataagtaatacagctaataatgaagctgaattaacaagtagttcgaagctaaacccttctatttttagtcctagcaaatgttgtgctaaaacgagatgaccacttgaagaaatcggaattggttctgttaatccttggaacagaccgagaattaaatattttaaaacgtagtaaaattgttccataataacctccttgtttattagttgaaagaaacaacttttccagtataacaaagatatggatgaatattgaaaagaaataaatattctaaataaaataaaaatcccttatagcagtataagggattcttaattttaattaagaagtcactgttccttgaagacttttagacaattgaacatcgactttttcagcatcatgaatatgattcataatagtagtatttaatttttggaacatttgttgtgtgttagcaaattctcgtaatatgtcatcattacaagacttttggttttcgatagccttaataacatttgtagcaccattttgtaacgtttgaatcataactaaaatattttcaattctagcatttgtatcggcgctcatttctacaccttcatcgactaaatgtaaattatcttttgtgttatcatatgctttttcaatttcttcttgaatttttttcgttaagttgccgatgttttttgtactttctgctgtactttccgctagttttcttacttcattggcaacgacagcgaatcctttaccgtgctctccagcacgcgcggcttcaatactcgcatttaatgcaagtaaatttgtttgtgctgcaatgttttgaatgacttctacaatttgctcgatttcctttgagcgttcgcttagatgattcatactattagacgtgcgttgagattgttcacctaatttattaattacaataagtaagcggtgaacggattcttttccttcattagagcagtcaataatttctgcaatagactgaattaagctttgttccttttgtaacatttcattatttaactcattggaatgtgttgtacgtgttgaaacattttcgaaacatgaacttaattgttgaactaaattttgaagtgtattatgttggttatttacaagttgatgctcttggataacgctttgtacacgatcgtggatagtagaaatagtctcctgcttttcgatatctttttgttttaattctgcttctaattcttgtatacgctcttgtaattgagcaattgtatgttggagtgattttttttgagtaaacatgtatttatttcaaccgccttcgaaagttatattttctctatatttggattttagcatcttttgtattttttaaatataggaattgttaaatatttaagaatctattacattttattcataattctctttttttcgtcacgaaaaataaactgtatttaatcgttttgtaaacaaactgtaaaataaatcatgtataactgtataagaagggagtcggattatgaactattttaagcgaatcagctgtctagtattagcaggaattatcggtctttctagtacagtcgctgttaaagcagagtcaaacgacgagaaacttaacaacatgcaacagcaattgcaacaaaacgatgcagaaatgcaaaagaaagagcaagagaagcaagctgttagtaaagaaattaaaggtatcgaaaacgaactacataatttaaataatacaattgcaaaaaataaagaggatcaagctgctattcaacgtaaaatcgatgaaacacataagcagattgagcaaaaaaagcaagaaattgtcgttttggaggataaagtccttgctcgtaaagatattatgagaaaacgtatggtttctgttcaaaacagttcaaatacaagtttagtagtagaagttgtagtagaatcaaaaaactttgcagacttcttacaacgtatgaacgcagtttctactattctagaagctgataaagaaattttacgtctacaagaacaagatcttcgtcaaattgaagaagataagaaaacaattgacgaaaaagaagcatctttagtagtagacaaacaaaaattagcaaaagcgcaagctgaactgcaagataacttgaaaaagcgtcaagataacttacaaacagttcaagctaaatataatgaagttgcaagtcaacttaatttagcagcggaagaaaaagctaaaattgaatcaaatatgaagacagtacaagaaacgattgctcgtgagcaagaagcagcaagaatcgcagcggaagagcgtgcaaaagcagaagcagctgcaaaagcagagcaagaagctttagcgaaagcacaagcagaaattgctgaaaagcaaaagcaggaaaaagctagtaaaccagctgaaccagttgctaataataattcgaaggtagaacctgcacaacctgaaccatcttctaagccaactgctggtgggaaagaaatttatgtagaagctacagcttatacagctgatccaggggaaaatggttatgcaccaggtcaacaagtattttctgcatggggaccaggtggtaaaggttataatctaactgcaaacccaggaatgaaattaattgctgtagatccaaatgttattccattaggtaagactgtaaatgttgaaggttatggagtagcaattgcagccgatactggtggggctattaaagggcatagaattgatgttttaatgccagataaaggttcatcaagtagctggggcagaagaacagttaaagttacaattttaaactaacaagtaatccaactttacaatacgtagagttggatttttttataataataatgttaagttgagtttacattttgttaagaatagcatacaataatggtgagaggtggtaaatttgaccattttaaacagagtaaaagaattaagagctcgttttaactttacgcaaagcgtattagcagaaaaggttggagtaacgagacaaacaattgcagcaattgaaaaaggggattacgttccttcgttgttattagcacttacgatttgtgatgtgttccagttaaagatggaagatgtgtttgttttaaataaggagggagaagaggatgaatagaattgttttttcttatattataaatgtactctatactgcactagcatgttggacatttgttgaattttatagtgttattacagagttagcacatataattaaaaacgagaaattcccatttgaagtatggtttaatggagtaccattcattttattatttattggagcaattatagttacaattttttatagaattcaaaagaaaaaatataagaatttatctttttggatgtatccattattatttccgctagaagatgaacgtgaaaaagcgattacggataaagcttgccgaacaacatttgtatcgttatggtttgtgttaccttgtgcagttggatttttaactttttcgcctattattaatgaatatcttcctggatacccattatatattctattttctattttctttattcaaatgacagtatttcacgtatcactatacagaaataaattagcttaaaaagaaaccttcttgcaccggcaagaaggtttctttttaagctaatacttgtacatatgacgatattattttatcattttatatagagtaagattttgtaagggaaaggaactgtgtatgaataagcaaagaatttatagtatagtagcaattctgctatttgttgtaggtggcgtgttaattggaaagccattttatgatggatatcaggctgaaaagaaacagactgaaaatgtgcaggctgttcaaaagatggattatgaaaagcatgagacggaatttgtagatgcttccaaaattaatcaaccagacttggcggaagtagcgaatgcatcattagataagaaacaagtaattggtcgtatttcgattccaagtgtttcagtagaactgcctgttttaaaagcttctactgaaaaaaacttattatcaggtgcagcgacagtaaaagagaatcaagttatgggaaaaggaaattacgcattagcaggacataatatgtctaaaaaaggtgttttatttagtgatatagcttctttgaaaaaaggcgataaaatttatttgtatgacaatgaaaatgaatatgagtatgcggttactggtgtatctgaagtgactcctgataagtgggaagttgtagaggatcatgggaaagatgagataacgcttattacatgtgtatctgtaaaggataattctaagcgttatgttgttgctggtgatttagtaggaacgaaggcgaagaagtaaaaaagaaggtgaactctttaaagagttcaccttcttttttactaatgttgagaaataatagaatatttcggttcgtatttaagtattcttctatttatgtataataaagttagaattctatattttgggaggaacaagagtgagacaacaggtgaagaaacttcttttaacaacgagtatagcgttattggtagctccaatttcagcttatgcgcatccagggcgtacagatgctaatggcggacatacgtgtcgtacaaattgtgagaagtggggattacagtacggggaatatcattatcacaataaaccagcttctagtagtggcgcaacgagcccagctcctagtcagaataataatagtgctgtagaagctgagagacaagcagaagcacagcgcaatactgaggctgaaaaacaacgtgctgcagaagcacagcgtaaagctgaagaagagagacaacgtgtagccgaggaacaaagaaaagctgaagaggcacgtaagcaagaggaagcgcagcgccaagctgatatggaaaaaggtcaacttgaaggtcaaaagaatggagaaactgattttaaagcaggaaaaaatgatgcagaagtgcatgtagctggaaaatctgatgcatataaacaagcgtttaaagcgacttatgcagccgcatggtctttagaagagcagaagaaaacgcattttgaaaaaggaaaagaacaaggtttagcacaagagacgatggacgatagtcaagttgctccagagtttaaggtaaactttgcagacgggttcaaagtagggaataaagaaagaacagaaaaaattgaaaaagagcaagctgaattaggggaaaagacagggaaagaactagctgaaaagaatcctgaaaatagagagaaagaagtatacgtgaaggcatatgaaacagcgtatgaaaaaggctataagtctacaaaaaaggcagtagaaaaggctggctataagtatgcatttgaaaactatgatttaaaagttcctgctaagtatgaacgaaatgaattgttaaagaagtggtttactgaaggatttaaatcgaataaaaaagcagcggaaattcgagaagaagggtataaaaaaggagacagctggttctcattcttctataagagtttcgtaccaagtgaatataaagaacataaagagctgtacgaacaagcaatagaaaaaggtaaaacagcataaaaaagatgaggagaaattcctcatcttttttaatccatccatttcactaatttcttagaaattaataataaaacacagcctaatacaattgccacagcgccaataactgtgaatacttcagcgtatccaagtgaagttgtgaagcttgcgagttgtccgcctaaaatgttggcgatacctgaacttgctagccatacacccattaataaagatgctaattttaccggagcaagcgcactaaccattgatagtccgacaggtgataagaatagctcacctaacgtatggaaaagatacgtaaagacgataaacagtaagtttgctttttctgtaatgttatgttcatcactacctgtttttaatgtagcgataacgagaatgatataaccgataccgagtaagatcataccaagtcccattttagttgggatttttaaatcaccttgcttgcgagttgcaagttttgcccataatgcagaaatgactggagcaagtaaaataataaataatggattgaccgattggaaccaagatgttggaacttcccatccgaacacagagcggtctacaaatttgtttgtatataatgttaatgagctaccagcttgttcaaagccagcccagaagaagacaacgaagcatgttaaaatgacgataactgcggtacgttgtttttctttttttgttaacggtgtatctcctactgatggttgtccagcagctgtttgtaaatcgcgagttggttttttaccgatattaccaaggaagcgatttgatagtgttgtaaataaaatttgtccaatgatcattccgattgaagcggctaagaaaccgtaacggaatccgtaatgtacaacgccatcaactgttgttttgaataaattttctgataaaaatccgcaaacgagtggagctaaaaatgacccgacgttaatacccatatagaaaatggtaaatgcactatcacgttttggatcgttctcttcgtataattctccaaccagtgtagagatgttcggtttgaagaatccgttacctataataataagcgctaatccgaggtataggcctaattggttttgcaaggcaaatagtgtaaggttaccgattgccattgttataccaccaattgtgattgcttttcgtctacctagaaaacggtctgttaagtatccaccaatcattggtgtgaaataacaggctccagtataaaatccgtaaatagagagtgcccatgcgggactaaacccaagaccaccgcttactaaagctgtcgttaaatataatgttaataatcctcgtaatccatagtaactaaatctttcccacatttctgtaaagaagagtaagtataaacctggaggatgtttcttttttctttgttgttctctttctagttgtatcgctgattccatgttattttcctcctgacacaaacaaaaacaaagttaataatttcgtacatttaatattttaccttattaactattataagtcaataaaggttgatttttcagaagaaattggaaaagaggaatagctatagaatgggtgtttcttttgtgatagactatggactatgttttctttgtaaggaagcgggttattgtactttttatatgtgaaattgatttcataaaagatgaaattaaagaaggagaaagaaatgaaattgttagagaaaaaagaaattttacttattagccttatgttattctctatgttctttggagcagggaatcttatatttccacctttccttggatatgaagcaggagaacatgtttggatttcattagtagggtttattatatcagcaacaggtcttcctatattaggtgttatctctattgcaaaagcaggaagttttcaaacgttagcgggtagggttcattcttcatttgcaattatttttccatgtatcgtgtatgtatttattggacctgggcttggtataccacgtgcgggaagtttagcttttgaaatggggccaggtcagttattccctgaagcaggaaacggattattattgttttacacagttattttctttagtattgtttactggttaagtttatccccatctaaattaatggggttgtttggaaaagtcttgacgccgttattattatgtatgattgcactcatttttataaagagtatgtttacaacggtaggagatatgaaagaaccaatagggaactatggacaagctcctatgtttcaagggtttttagatggatatttaacaatggatgcgttagctgctttaatctttggaattgttattgcaaatgcattacgtgcaaagggtattgaagatgataaaggtttagcgaaatatatgagtattgctggcattggggcaggattattattatcgattatttatgtcatccttggatatgtgggggcaattagtggctcattaggaacatttgataacggtgcgaaagtgttagcacaagttatgattacattatttggacagggcggagtcgttttattaggtcttatttttactatcgcgtgtttatgtgtttcaattggacttgttacgtcttgtagtcaattttttgcgagtgcatttccgaaagtatcttataaattgtgggcatttatagtaagcgttgttagtatgattttagctaatttagggttaacgcaaattttaaaagtatcagtaccaattcttggatttatttatccaattgcgttaacgcttattattctagggttattccatcagtatattggaaagtatgcatacgtatatgcagtaactgttttggttgtagcgatatttagtgcaattgatattttaaataaaaatgtaatgatgaatcagtggacgtcagcattaaaatacattccgttttatacagaaggtgttgggtggattgttccagctattgtaggcatgtgtcttggtttcatcgttagcattgttctaaataagaataaatgagtaaaaaggtgttttcctattttgggaagacgcctttctttttttggaaaaatactattgaaaatgaatagactaagagtatgataaagataattggtaatatataggtttaatgagagttacgaatgagggggagcgtatgaagaaggatttggataagaaaatagaagcactcgaaacggcaattgaaacaattcaagaagcacttgctgaattaaaagtaaagcaaagggaaatagaagtagaaaacgctcagcaacatgttagtaagaacaagaaagaatatattgaaacggtaatggaggaaaagccaaaagaagaaatagttaagataaaagagcctttgcaagaacgtcaggtaaaacaagtagatatatctgcttttaaaccagagccatttaatattattaagttttgtcaaacatggttaccgcgtgtatttgtcggtattatgttgcttggagtgatctggttatttaaagcaggggtagatgctggcttattaacaccagcgatacgaattgtgtttggtatcgtattatctatcggattgtattatataggagatattcaaattaaaagagagcggcaggcgttagggttagtattagctggaggaagtattaccgggattgttctaacaacgtttgcagcacattatttatatggatttattccggcaagtgtcgcgtttctctgtaatattgcatgggttattttaggtatttatttagcgaaaagatatcaatcggaatatctcactattttcgtagcggtcggagcgttcttcgtaccattcttgttaaatagtacgactcctaatccttatattttctttggatatgagacagtattgacacttagtttattatggtatgcgttgaaaaatcgttataaatacttatatatgatttcttacgctgttgctgccattgtccttttcgttttctttgctgttatgtcaatgttagtagagaacttgcaaatacagttaacgattgtatatggtttgattcatttactattattttggcatatgtttacggagagaagttttatactagaaccacgtttggcgatatttagtgcaaatgcagtgttctttatactagctatttcaaaaatacctgattttacaacatggggattaattattagtgcaatcgtgcatgccgctatgttcgtatttgaatataggaaaaatagacattctacatttacaaatctcttatttggtttcgcaatgggagcatttagtttagcaattttatatgagtatagtttagtgaatgcagcgattgtactattattacaaggtttcctcggcatggtcacttctattaaagtaaaacaacagataaaattgtatgttagtgcgacggtttacgcaattggaatgatacagactatttttagcccgtttgatcaatttatttcggcaggctttgttgctcatcttattttaataggaacgttctattattgcatgagagaagcgaaagaagtattagcgagcttcggcaaatatatgtattctatagtgctctattggtttatgataattgtatttattacaattacgagaatcggtgaagttttatctacagatggaagcgtaattagtgtatcagtatcgttattatggatggtatatgcattatttgcggtttggtttggaagaaatagaaatatgaatgaaatattatatgctggtttagtcgttttagtcgtaacggtagggaagttattcttacttgacttaccagaggtatcgatgatgattagggcagtgttattcctaatcgtcggtagtataggtatcgttatttcaagaatgtttttctcgaaggaagagaagtgagaagaaggcaatccatgtatggattgccttttttattatttcttattaattgttacagtttcattatatttcgttgttgtattttggcgtagacgaagcgttgcttgtccaattgtatttgaatcaatctgtacatttacaactttctcagcagagcctaagctgtttgttgtgaaagaaaatgcactgctatatccaaaagtagatggccaagtgccgtttgcattttgtactttagccacttgtgttcctccagtagtgaagatacctaaagaatagttgttataagttgtattaggtagtaagttgtttacttgaatcttcatttggaaaatttcattgtttggtagaatgctagggtgtgtaacgacgtagtcgcttgttgttaccgcaccattataaccgtatgaacctggtttgaaagtatttgtattaaaccattgataacctgcatttggtgcaccccaaggttcaggttgtggttctgttgataagcttggctgttcaaatgtctgtagagctgtaggtgaatcaagttgtaaaccatttacttgatctaaacttgtaaatgtctctttattcgataaccaatttacgatgttttctaataagatagcatcgttttcttctttataaccatcgtaagttttctttgtttggccagaatcttcacgaacgtactttggcgtagcatcttcaacaggagaagagtcaccaataaaggcagcttttccaagtcctacttttgcaattgcagcatatgggccttctgcaataccaccgccattataaacgccactatcaacagcgttattccattttgatggattttctggaaggtaaacaagtccttttgctagttttgggtttgtaattgctagagtagaaccagcatgcattgctacagacgaaacaccttttgtaattccgaaagattgttcaggtgatacaattgttttcgctgaaacatcaccaagtgcattgtagcggaagcgaataccgaagttgtcagagagccaatcagagctttctactccttgcatagcttgtgaatttgcttcttcattagacattccttttgctggattatcccaagcaccgcgtctatatccattaaatacttcagaagagtcccagcgatttttattacgatctgcattgtaatgatcagcaataaagaagatactaccaccattttttacatattgtaacatagcgtcctgctcagattttttgtaaggaatattagcttctgggacgataaatacattgtaatcttttaaatcttcgtacgtaataggtgttgatttacgaagttcctttacgtgatatccgttttttgcaatgccgtttccgaagtcagaaaagccgccgtcaataacccagtcagctgtcccagcagtttgaccgtgtgtattatcaaataatactttcttcccattgttttgatttacaacttttgcagcaatttcaggagctgggtctacagagctttcggcataagtagacggtatgaacgaggtccctatacttagtgtaattgctgttgctaaagaaaatgtaatccattttttattcttcatagaagaatccccctaataataaatatatgtgctttaataatgtaatttatttttctgtaaaaataaagacggaaaacataaaaaatattaaaaaattgtaaaaataccgtgaattttgttgagaaatatttatatagatataaaaacatcccttccaagtaataaggaagggatgttttgcttaactaatttttgagttaggtgtttcatcaatcttatgaaaccctttcatgtaatatacgattgctaagccgataagccaaattgggccgacaatcaatgcaattcgtgtatcttctgaatacgccattatacataagactagtgcaaggaaggcaagtgagaaatatgagcttaatgggtataaaggcattttatatgataacttttgtttattttgagtaggcaagcttttacggaatttaatttgagcgactaatataatgccccaagtccaaattgcaccgaaagttgaaatgctagtaagccatgtaaatacctttgcaggtacaagatagtttaatataacaccaattagtaaaacgatagcagttgctacaattccttggcttggaatgccatttttatttaaacgaccaaatctttcaggagcttttttctgctgagctaatgtatatagcatacggcctgtactaaataaaccaccgttacaagaagaaagagctgctgttaatacgacaaagttaataatacctgctgcttttgcgataccaatttgctggaatgttaatacgaatggactgcctttctcaccaagttcgttccatggataaattgccatcataacgaataatgccccaacgtaaaagagtagaattctccaaaatacgttatcaattgcctttgcgagtgttttcttcggattttgagcctcaccagctgtaacgccgattaattcaacgcctaaataagcgaatagtaccatctgcatggagagtagtaacccagaaaatccatttgggaaccagccaccatgtgaccaaagatttgaaataccagtagcgataccaccgtttccgaatccgaataaaataataccagctccgactactatcatacagataattgtgacaattttaatgagagcaaaccaaaactcaagttctccaaatacttttaccgataagaagttaaaagcgctcattaataatagagcaagtaatgcccaagtccagcgcgggatatcagggaaccagtactgcatgtaaataccagctgctgtaatttcagccatacaagtaacaacccataagaaccagtaattccaaccagtaatataaccagcgagtggtccaatataatcatatgcatatttactaaaagaaccagcaacaggttgttcaattgccatttccccaagcgctcgcataatgaaaaaaataacgagaccggcaatcatatagcctagcaaaatagaaggacctgctagtttaatggcggaagcggatcctaaaaatagcccaacgccaatagctgagcccagtgacattaaagtaatatgtcgttcttttaaaccacgatttaaagttccagatttgtttgtgtgctgcataagaagaatcccccttgtagagtgaacgatatttgaatgcgtttactaaatatttaactatttcaaattataaaacatttctatctgttatgctacaaaaataatcataatgaactgtactacatctgtacttgtcagacttaaacttaaaattcgaactattagggaatatattgactcttctttttattgattgttaagattaagtattatattttctcgcatactagtaagaaaaagaatgtgtgataataattcaggtgtaggaagggtacataagcatgtttcaattacaaaaatataacacttctgtgaagcaagagtttttagctggcatcacaactttttttacatttgcgtatattcttgtcatcaatccaaaaatattatctgatgcaggtgtaccatttgaccaagcgtttacagcaacaattattgcaaccgttgttggaacagtaggtatggcgattttcgcgaattacccaattgttattgctccagctatgggaatgaatgcatattttgcttattctgttgtacagaaggcagaagggattacatatgtagttgccttttcagctgtatttgtaacggggattatttttcttttattatcttttacttcgtttaggcaaaagttaattttagcaattcctgatagtttaaagcatgcaattgcaggtggaattggactatttattgcttttattggattgcgcctttctggaattatcgtggatcatccgtctaatttagttacgattggtgattttcattctccagctgttattttaactttaattggtttaatattagcggcggtattaatgacattgcgtgtgagcggtgcattatttattagtatgattgtgacaggaattattgccttctttacagggcaattgaagtttgctgataaaattgtggcgatgcctcatttaccagagggtatcatcgtttcaaacccaatcaatgccttttcagatgtaattgaatacggattatacggcgttgtattttcatttttacttgtacttttattcgatacaacaggtgcattactcggtttaattaaacaagcaggtttaattacagacaatacagagaagcgttttggtaaagcgtttattgcggatgcaattggcgggactacaggttctatctttggaacaagcccaacagcagcgacgattgaatcgtcagcaggtattgctgcaggtggtaaaactggattaacagggattgtagttgttggtctaacaattataacggcattttttagtcctgttattgcttctttatcaagtgtagccgctattacagctccttcattaattatagtaggtagtttaatggcacaaagcattcgagatattaattggaatgaatttgaagatgcgttaccagcatttttaatttttataggtattccgttaacatctagtattgcaaatggaatcgcaattggatttttagtatatccagtcttgaaaattgtgaagggtaaagggatggaagtacatccattactatacttatttgcattcttatttggatgtcatttattcttataatataaatataggagagggccttcttatgggaggctccctttttgtgtataataaagtgaaactatgagcagtaggggatatcctcactgtgtattagcccgcaccaatcgggataagatgaaaacttaattggttttgtaaaatataaattacttaacggaatatatatgttacaatatagatagaggaggaacatgaatggctgtaagtaaaataaaagtcgcgcgtgttcagttagatttaacacagcaacaattagcagaaaaagtaggcgttacaaggcaaacgattagtttaattgagaaggggaaatacaatccatctttagatttatgtttaaaaatttgttatgcagtagataaaacgttgaatgatttgttttgggaggaaaaggagtggtaggatgaaaatcgtgaaagatgaacgtttaatgattgaagggttaaaacatattagattagctttcatcttacaaaatatcgtcatactagctatcgtcttttaccgctatgtcttgcaaggggcaggatatgaaagtgtttcggatttattaatggtatttatgggcgggataataattattaactttttaaatctgaaaaattcagtggaagtgtatgagcatacgggcggagtgtcgcgtcgttattttatgaagctattattcattccggtgggtattattattgggattttagctatttgtatcgttgtaacaccagatatttcgataaaggaaattagtatgacaggacttattatgtttgcttgttttttagttcctagtttgtttatatacatatatatgaaaaaaataaaaagagaagattgaaatataagaaaggctttcccgtattgaggaaagcttttcttatatctttttatacaaaactttatgaaggccaattggttcaagttcaaaaatttcaccatgctcctgaaagcctaatcgcttgtaatagtcagttacagtaattcggccattacaccataacatatttgcttgacgctcttgtaagatttgttctgcattctgaattaaggagcttccagcgtggttgtttcgaaactcaggtaatgtggccattcctcgtagacgataatgaataccggctggtaggtcagggtatatttcttttgagaaggaagcgatactaattagttcatcgtttataaatgcgcctaagtggaaggtgtctgtttcataatcggaaggatatttacaatctgctaatgtttgattggggcgtaaaattttttgacgtaatacgtaagtttcagatccctcaatatttttcacgataatcatattaacatcctttcttataaggccttttctgttaattgtataaagaaataagcaggtgcggcgagaagtccgagtatgctagcagttccgagaaggagtgaaagtaggaggcaagaatattttattccattcgattttttccatccgtaactacaaatctcaatactaacaccgatgagaataatggcaacgagtatttctgctaataataaaagagctaaagttacaatagacataatgtgatccatcctcataatatgtgatagtaacattttaccatatgaagttaaaaaaatgcccctcaattatgtgaggggcatttttttactctaatatgttttttagtgtatcgatatgttcttttgaacctgttacaagtaatgtgtcaccgtgttgtagtcttgtatcaccatgcggtattaatgctttgttaccgcggtagatttgaatgacaagtacatcacctaaaaacgggaggcggcgaagcgcaacgccgttatatttattgctgcgcagttcaacttcacgtactgtttcgtttgctgttgtaattaagcgaacgagactaggtttatcaataagtgcacgtaataaaatacgtgtagagttaattgttgagaatacagcgatatgttcttgcgttgctttttcttgtagaagtggatcttctacacttgcaataacatgttcaacacctagctcttttgcatgttctgccaataataagttttgttcatcatcgcttgttgcaacaacgacgcgatctgcatcaaatgctgtttgttcagttaatgatgcgattgtgatgtcatctaatttcacgatagggaagtcatgtgatttcgcttcttcatcatttattttgttttgacgcatcatatatagcgttacgtcataatcttctcgttttaaatctagtgataacggaagggtaattctgctcgcgccaataatagctacttttggttttggtgtttctacttttgggaacatttttttaaacaatataggtgcaaaaatacaagtaataactgcgcttaaaataagagaggcagataaacttggactgatgatctccagtttttcaccaatttgtgcagccgcaataactaaagaaagtgtcgatgttaataagattgcacttccaagtacgatattacgtggataccattttcttaagacgagtgatggtaagagtttcgaaataaagagtcctacaattaagattggaatcattagcatgctagaaggttctttgaaaatagaccacacctctagatttacaccaaccattacgaagaaaatagggatgaagaaaccatagccgatagaatcaagtttttccaccatatcttcatttggtgataataacgatacaagtacacctgctaagaaggcacctaaaatattttctgctccaacagattccgataacccaactaagattaaaatgagtgcaaaaacagctcgtgtatcaatttgtacactaccagcttttaaactatctaagtatggaatgtttttaaagcgttttgcaataaagtaaatgacaataccggcaccgaatagaataagtaagagccacatactttgaccgctttcggaatttaatccgacgaaaacagcgagtaaaatcattgtaactaagtctgcaataacagcaactaataaaatgatttgtccgattgcagtttttcctaggttgttttcttttaatgttggtacaacaacacctaaagaaatagttgaaataattaaagtcatgaacattgcattatctacaaatcctagccatacgaatagtaatgatagggcataagataagatgaaaataaataagaagataatgcttgctacttgaaatgtatttggctcgtttgtcgtattttttttccctttttgtttaaagatagaaaaatcaatttctaaaccgcttaagaacatgaggaagataaatcctaatgttgataaaacttgaagccatatatctggctcaataatattaaacccacttttacctacaaagattcctgcaataatttctgcaacgacaacaggaagtgcttttaatttaaagcgttgtaacaaaaggggaacgaaaaacgcgattgcaacgacaaccataagtgatagaacagaagtatgatgttccattgcgttctctcccttcaaataaatatagtacctatttagccatataataggtagaaaagcaacgcatatggattcgatttcataaagaaagatttttcttaacatttgtcataataagtatatttttcatgattctgttgttaattccgtaatgtggatgtaacaggggaggggataaaaaaagactgctgaggaatctcagcagtctttttcatgtacattacattgagaagaagatccatacagttaaaccaactgttgcagttgcaacgaagaaactgtatatcattgtaagaatttgaactcttccttctccttcttttaaatgcatgaacataattaattgtaacaatgcttgcgcaacagccattatgataatagttgttaagactgttgaaagtggcaatgttgtgtaaagtgccacgtataacgctagaaacgttaatgcaagcgataaaataaatccgaaaacgtgtgaccaagggaatccgctatgcgcatgcccgtttgcttgattgttgttttgagccatttacgccaccatcccgttcaagtaaactagtgtgtaaataaagacccaaactagatcaaggaaatgccagtataagctgataatgaatactttacgagctgtaactggtgttaaacctcgttttaaaatttggataataacacaagttgcccaaatgataccgcctgttacgtgagctccgtgcgttccaagaagaacgaagaatccagataagaaagcacttgtttgaattgttgcgccttcaccaatgtacataatgaactcttcaatctcaaagaataggaaacctgcacctaaaagtaatgtaaggacgaaccatccaagcatcgctttttggttatgcttacgcatttcatgaattacgataccgcatgtaaaactacttgttaaaagtagtaatgtttgaattaaaagcgttttaagttcaaacaattgcgctggtgttgggccatctgccgtacgaccagcaaggactagataagaggcgaaaagtgttgcgaacagcataatttcagccccaagaaaaatccagaatcctaggatattcaatctgctttgttcggattgatattccaaaggtaagcttttatctaaagccgccatgtcatttcacctctcatgctatatgttctgtttttttaatttcatcaacactgatatagtaaccttcatcataatcgaatgaacgatagattaagcaagctaaaataccaactccaccgattgctgcaagccagaaccagctaaatactaatgcgaaacctgcaagaccgaagaatccagacgcaataataggcacaccagagttacttggcatgtgaattggtttaatatcttctgctgctggtgtaactgtttctccgcgttttttcatgtaccagaaagcatcagcttctttaatttcaggaagcttcgcgaagttgtaatgttgtacaggagagtgagttgcccattcaagtgtacgaccatcccatggatctccagttgtgtcacgttcaccgtgacgtgcactccaaattacgttgtagcaaagaagtaggaagccgatacccatcattaccgcaccaacagatgcgatttggtttagccatccccatccaagactttcagagtaagtgtacatacgacgagtcataccgtctaaacctaagaagtacattgggaagaaacagatgttgaatccgctcataaagatccagaatgtccatttacctaggcgttcatttaacatatgaccagtcatttttggataccagaatgtgaatccagcaagcatagcgaatactgtacctgcgattaatacgtagtggaagtgagcgattaggaagtagctgttatggtattgataatcagcagctgccattccaagcataacccctgtaaccccaccgactacgaagtttggaataaatgccaatgaccaaagcattggaactgtaaaacggatacgtcctttatacagtgtaaacaaccagttaaagatcttaacaccggttggaatcgaaatcgccattgtcgaaatcgagaagaatgagttaaccgctggacctgcacccatcgtgaagaagtggtgaagccatacgacgaaacttagtaaagaaattgcaaccattgagtataccatcgcactgtaaccgaatagacgcttacgtgagaatgtactaatgatttcagagaaaataccgaatgccggtaaaataacgatatatacttcagggtgaccccatacccagaacaggttggcccataacatcggcataccgccgctcgccatcgtaaagaagtgagcatcgaatagacggtcaaatgtcattaatgcaagagcaactgttaatactgggaaagcgaaaataatgataattgttgtaattaagattgaccaagtaaacattggcattctcattaaagtcataccaggtgtacgcatttttaagatagtaacaaggaagttaataccggtcattagcgtaccgagacctgaaatctgtaatgcaattgcgtagtagttatttcctacgcctgaagtaaactctgtacctgccattgggaagtaagaagtccacccagcgtctggagaaccaccgattacgaaagcgatgttgaataacattgctccgacaaagaataaccagaaacttaaagcatttaagaacggatatgcaacatcacgagcaccaatttgtaatggtactacaaggttcattaatcccataacgaatggcattgccatgaaaagaatcattactgtaccatgcgttgtaaagattccgttatagtgttcagcgtttaaataagttgtttctgggaatgttaactgtgcacggatcattaaaccatccataccaccacggaataacatgataaccgcagaaataatatacatggctccgatttttttatggtcaacagttgtcaaccattcgtcccaaagccatttccattttttatactttgttagtacgaaaatgattgctaatgtcacaagaacgatagaagcgtctgcaccgtaaataatcgggtcacctgtgacaaagaattcatcaagcttcactgtgttcactccaatctgttggaataatagctattattttttgtttttgtagtagttataatcacaatattcaagtgattttggatctacataacttaagtggtgactagagaatgtcatacgaccaactacacctggtttaacaatttcgttgtacttagcttctgttagtttaggagcagtttcttgtacttctttaacccacttgtcatatttctctttagtttttgcttcaacttcgaactccatgtgtgtgaatccttcaccagagaagttcgcactacggcctaggtaagaacctggcttatcagcttgtaaataaagatccataatcatgccatccattgtgtacttcataccaccaagttctggtacccagaaagcattcattgggccgacagaagtcagtttgaattgaattggtacaccagctgggatgtttaaatagttaacggtttcaattttttcctctgggtaactgaataaccatttccagtttgcagatgtaacataaatttcaactggtttaatatgtttggactctttcggaacctcttccgaagcataagttgcttttactgttggaatcgataatgcgataacgataataacaggaacaagcgtccaaataatttctagtaatgtgttaccgtgttgttcaggtggctcatagtccatattctctggtttttcacgataacgaatcaagatgactgtaaacagaatgaatacaattgcgataattaatgacataagcaagaatgaccaaacaattaaatcatactgtgcttttgcaacaggtccttgcggatttaatactgcgagttttttatcacagccaccgaggaacagaagtaatgataacggaagaagtgaagccaacttccaaaacgctttctttagttgcacgattgaaaatctcctttctccttggattgaaactatgccaataaaacaatataaacctattaatttatagaaggcaatagtttttgatatattgttaaaaaatagacacaaatgcacactttttaaggtgaatatcatttgtaacttgattacattgtaaactattttccagagaaaaacgtgattgtgaaaattttaagataaataaagttataccaggatatccaagaaatagaaaaaagctatcttatgataaggaagatagctgaatattttgtatatttagtttatttcttgtgtgacagttcgtggctgttcaagtgtgacaatttttttatatttaacttggtataaaatgtaacaaataatcataaatggaatgccgcaataaagagcaattctttgatctggaatgaaagccaaactaacaaatgtaatgaaattgagcgagaacgctacgattggaacgagtggatagagcggtgtacgatattttaaatcatttatgttgccaccatttttcacgaaatttctacggaagaaaaactgtgaagcggcgattgacatccaaacgacaacggcagccattgctgcaatagatgttaaaactagaaagacagtatctgccgcaaatacacttgttagtaaggacaggctagcgaaaattaggctgaaaattaatgcatttagcggtacaccttttttagttaatttcgtaaatgctgggcttgccattccttgttttgccatcgcccacagcatacgagaatttgcatatagaccagagttagcaacggataatacagctgtaataataacaaagttcataatatctgctgcatatgggacaccggctacatcaaatacaagtacaaagggactttcaactagattagcctcttgccatgggagtaaacctacaacaactgatatcgctaagacgaagaagaagagagttcgccaaattgtattttttattgcttttggaattgttttttcaggattttcactttctcctgaagcgattccaattaattctgttccttggaaggagtaatttactgtaatcatcgtaagaagaacagctaatgcaccgttgggaaatagcccgccattttcagtgaaattatgaagcattggagctggctttccattaaagtctagtagaccgaacataacagcgccaccaagcacgatgaaaatgacaattgtcgcgacttttacacttgcgaaccaaaactctgcttctgcatatgcttttgctgataaagcgtttacgaggaagagtgctgctgcaaatgtaacgcaccaaatccaggaagaaacgtctggaaaccagcgtttcattaaaatacttacagttgttaactctacgccaactgtaacagcccaatttaaccaatacatccaaccgacaacaaatccaaaaccaggtgaaatgaatttgcttgcataactttggaatgaacctgcttctggcatagcaacggataattcaccaagacataacatcgttaaatacataacaaatccaccgactaaaaatgcaagaatagcaccaccaggtccggcattatggacgatttgaccagatcccataaatagcccggttccgataacaccgccgagtgcaatcataaataggtgtctacttttcattgttcgttttaaatctgtttgttcaatttgttgattcatatgcccctcaccccgtattttcttgaatgtgtaaacttcgttttattctgagtttttaatcattagtgggggatgcaaaacacactcggtttatttgctatgaaatgaatggagtatgtaaaaaacgaactatgactaaatactctaagaatgtttgttaacatggtgatatcttcactatgttaacaattttgattttagcaaaatattctgtaaatgtatatttatttttctttttattaaaaataattagaatttttataattaattctatgagcgataattcacatgatctttctagcaaactagtaagaagaagggtacaatgataagaggtgtatctgtaaaataataattaatggagttttgtttataatgaaaaagttaaaatatctttttgtttttggaattatacttgctgctgcattttttataggaaaagataaaatcatgcaaaaggcgcaagttctacgcttagagtttctatctgaaatgaaagaagcagctatgattgaagatgttccgtttattaaacaattaccagaattacctcgaggatgtgaagtgacaagtttagctatgttgctgcaatataaaggtgtacaagtagataagatgcaacttgctagcgaaattcatcgtgttccatttgaacaaaatggtttgcgtggaaatccttacgagggatttgtgggaaatatttatacaaaggcagagcctggatatggtgtatacaataaaccaatctttgatttagcagaaaaatatgttcctgaaaaagtaattaatttaacaggtagagacatgcaagatatatataaagtaattagttctggttctccggtatgggtcattattaatacgacgtttaagccgctagctgaaagtagttttgaaacatggaatacgagttcaggcgaagtgaaaattacatattatgagcatagtgcagtagtaattggatatgatcaaaactttgtatatgtaaatgatcctcttaaaaataatccgcgcttggctgttccgcgagcagaatttgagaaagcttgggagcaaatgggaaaacaagcaattactattttataataatgaaaaagtcatcttttggatggctttttctttttagtttaccatcactgaaaattcagaagattcttttaaaagttaacaattcacgttataataacatttaacttggtgaagaaggggagaagagaaatggatgttgcaaaggaacttgttttgtcaaaaaatcagttagttgagtggagaaggcattttcataagtatccagagttatcttttcaagaagagaaaacatcgcagtttgtgttcgatatacttcggaaattcccatatttagaagtgtcacggccgactaaatatagtgtgatggcaaagttagtaggtaaacatccgggcaaaacagttgcgattcgagccgatatggatgctcttcctattcatgaagaaaatgagtttgattttatttctatatataaaggtgtaatgcatgcatgtggtcatgatggacatatagcgatattacttggggttgtacataagttagtagaagaaagagagaagattaaaggagagattcgttttctattccaacatgctgaagagaattttcctggtggtgcagaggagatggttgctgcaggtgtaatggaaggtgtggattatattattggtgctcacctttgggcgtcgttagaggttgggaaaataggtgttatttatggtcctgcaatggctgcaccggatgtttttaaaattaagatagagggaaaaggtggacatgctggaatccctcatgaaacggtggatagtattgcaatcggaacacaagtcgtttcgcaacttcagcaaattgtatctcgcctcacgaatccattagattctctcgtaatatctgttacgcaatttcatgcggggacaactcataatgtaataccagagcaagccgagattgaagggacagtgagaagtttaagacatgaattacgaggtgaaacagagaagaagattgagcggattgtgaagcatattacggaatcttacggagcgaaatatacattttcatatgaatatgggtatcgaccagttgtaaatgactatgaagctacagagcttattgaacaaacggcattacaactttatggaagggatagagttgttcgtttacagccgacgatggctggagaagatttttcagcgtttttacaaaaggcaccggggacattcttttttatcggagcgggaaataaagagaaaggtattatatatcctcaccatcaccctcgttttacgattgacgaagatgcattactgattggagtggaagtctttgtatcagccattatgaactttataagtaaaggagaatgagatgaagaaaatacacattctagcgcttatcccagttctttgtttagtagttgggccaatatttgcgaattcagttactccttacgtattagggatgccatttttattattttgggtattattatcagtgtttattacatctttttgtatggggcttgtgtacgtgtttgatcctgctaataaggaggatgtaaaatgactgcattacttatcattattttatttttgtttctcgcactatttttagggattcgggcacaacatggaaaagatatgaatttagagcaatggtcagttgggggaagagggtttggcactatttttgtttttctccttatggcaggtgaaatttatacgacgtttacatttttgggaggaagtggctgggcgtatagcaaaggagcacctaccttttatattttaggttatggcgctttagcttatcttttatcgtattttttattgccaccgatttggaagtatgcgaaagagcataaccttgtttcacagtcggatttttttgcgaagaaatatagaagtaaagcgcttgggattattgtttcaattgttggtgttgtttccatcatcccatatcttgttttacagttaaaaggactgggaattatcgtttcagaagcttcttacggaagggtgtcacctgttgttgcggtttggattggtgctattgttataactatatatgtaatggtttcaggtatacatggttcggcttggacggctgctttgaaggatattatgatactgtttatcgttatgtttttaggtatatatttaccgtatcattattatggaggatttcagccgatgtttgaggctgtagaggcagcgaaaccgggatttttatctttacctgaagaaggaatgagtatttcttggtttgtttctactattatattaacggccctcggtttttatatgtggcctcatacatttgcttctgctttttctgcaaaaaatgaaaaagtatttcgtaaaaatgcagcaattatgccattgtattctttagttttacttttcgtattttttgcaggatttgctgctatattgcaagttcctgggttaaagggagcggatgtagatctttcgttattccgtcttgctttacaaacttttgatccttggtttattggaattattggtagtgcgggagtattaacggcattggttccgggttcgatgcttgttatggcggcttctacactgttagcgaaaaatatttatcgaacgatagttccatctgcttcagatagacaagttgctaagatggcaaaattatttgtgcctgtagtaacgctcgtggcagttttatttacatttaaaggaggagaaacgataggagcgcttctattaatgggatacagtattgttacacaacttttccctgcacttgtatgtagcttgtttccacgccaaattattacgaagcaaggagcgattgcaggaataggagttgggctgttagtggtcgcatatattaccttatctggttcaactatagccacaatgtttccgagtttcccgcagtatataaaagatttgaatgtaggcatagtcgcattgttaattaatatgattgtgatgtttgtagttagtgggtttacaaaaagtgtatctataaagaaaaacaatataatagtagaaaagtaattcgtttatcccgcattaacgggcagtaagaccctcaactcaaaattcagcggaagcaaagaagttaggtaggggccctgctgcctgtaaaagtccgattggtgagggctgattaaagttttactttattagagctatctttgaaaagagatagctcttttttgtatatattttcttcaattagcggaatctaactaaaaacttgttgaaaaggaagttaggtggggaaattgttagagcttgaaggtaacttatttgaagttatgaaagaaattagggatgagttaggttcacctaatgatttaacaattagagaagttgttcttgctgggagttttacacgttgtgcggttgtgtttttatgtgggttaacagacaaggataatgtttataaatatgtagttcgtactcttcaatatgaagaagtgcaaaatgaagcggctgtcgttcagacgttattggatcattttatttctattgcggaagtgggtaagaagacaacgtttccggatattataaatgcgattttagcgggagatacagttatattaattgataatattcaaactgctatcgttattaatagtagggcttgggagaagagaagtttagagccaccagtgacagaagatttaatacgcggaccaagagttggattaaatgaagatattaatgtgaataaaatgttaatccgacgcagtttacgcgatccaaagttgaggttccaatcttatattatggggaagcgatcgcagaaagaagtaaccctagtatatatagaagatattattaatcctcacattgtaaaagagttagatcgccgtcttcaatcaatagtgacagatgttattttggaaacaggtacgattgaacaattaattcaggataataatttatctccatttccacagtttttgaatacagagaggccagataatattatagcgtcattagcgaagggaaaagcggccattttagtagacggatctccgtttgctcttattgcaccgcttgtgtttgttgatatttttcaatctgtagaagatcattacgagcgctgggtgattggaacgttactaagatttttacgtatgggttcaggtataatcgcggttttgttaccagctatgtatgtagcacttgtatcttatcatcaaggacttattccttctaaactggcttattcaattgcaggtgcgagggaaggtgttccgtttccagcatatattgaaacgttaatgatggccttgactatggaattaatacgagaagctggaatccgattgcccaaaccaatgggacaaacgatagggattgtaggaggtcttgtaattggagaagctgcggtaaatgcagggattgtaaatccgtttttagttattattattgcagttactgcgattgctacgttctcgcttcctgtatatagtattacgattacgttccgaattttacttttcgtctttgtattagctgcaacggcttttggactgtatgggatcattctagctctgattgcacttgctattcatattacaaatttaacaagtgttggtataccgtatacaactcctattgctcctgcattttataaagattggaaagaagaatttattcgcatgccaaaatcgatgttgaaagatagaccagagtacttacaaacaaaagattctacaatacgtccaaaggagcgaaaataagtgaaaccatttgagtatggcgatgaagagattggatctcgggaaattgggtttgcggtatcatcgaccattattggtataggggcattgtctatgccgagagatatcgctaaccaaactttattttcggacggttggattatcttgcttttgggtggattgatttgcgcagttttaggctggtttgtgacgagagtggctatcttatttccaaaacaaaattttgttcaatatacgagtgcgcatttgacgaagcctgttgcatacacaattagttgtattttagtattaacgtttgctgctttgacagcatatgaatcgcgaatgatttcagttatttctcaaacgtatttatttagtgatacaccaatacaactactgtctttcttcttcttattagttgttatttatggaatagcaggatcaagagcagccttattaaggttaaatgttttattcttacctattgttttaattgcgatagtacttctttctttattgaatataaatttaatggaaataaataatttactaccagcttttcaaacgaaagtaagtcaatatgctgttggagttaaaaattctatttttacgtttattggatttgaagtagctttattttatgcggtgttgctgaatgataagacagcgaaaaaagcgccgatggcagtcgcgaaagcggtgatggtaaacgtgctgtcatacattttaatttatgtaacttgtattagtgtttttacgtatatgacaacacgtggattgacatatccaacaattgaattagggaaagaaattgaaattggtggaggatttttagaaaggtttgatgcgattttttttacgacttggattattactatttataacacgacagcaatgtactatgatgtcgcatctttattgttttgtgctatgtttccgaaagtgaagaaacatatttttattttcgtaagtgccccaattatttttatggcgaatatgatacctagtagtttgaatgctttatcaagttatgggacttatttagcttggatagatatggggtgtgttgtgttagcacctttgctcgttttaattgtatataaaataaaaagaaggaatggtggaaatgaaacaccttcttaaaattataatggttatggctttaactggatttatgagtgggtgttctgagttagaagagatagaagaaagaggatttgtagtaggagcggcttacgatatcgtgaaggagaagaaagcgaatccaattatgaaagggacctatcagatggtactccccagtaaattgtctcaacagggtggacaagggggtggggatagcgaaaattatattaatgttagtgcaaaagcagatagtgtatttgaacaaataagaataatcgctaaaaaaattagccgtacattatttttccctcatatacaagtgattattttctctgaagaattactttcacatccatacattttacaaaatacgttagatgtatatattcgcgatcatgaaatgagaagaaatattcgtttgttcgtttctaagaaaaatgcagaagctattttaaaacaaagtgccaagcctgaaaatttaccggcgcagtatattgatatgttagctgaacaccctccgaaaaatgcccaaatgattgaggctgcaagaattggggaggtacaggagaagatgatctctaaccgcagttttgtattacctattcttgaactgacaaaacaaggggtacaaatgaacggtgcagcattgtttcgtggaaaggataataaatgtgtaggcaatttgagtggggaagaaacattagggatgaattatataataggcaaaaaaattggaggtttttttacgattcgtaaaaaaaatcaacttattacatatgaaattcataagttgcgtcgaaaaattaaagtatctacaacgaatgctacaaaaccaaagtttgatattcatttatctctggaaggcacattggctgagttgcatttcagtgatcataaaaaggttttgaatgaaaagcgtttagagaaggatatatcggaagaaatggaggagcgtattcaaaaatcgattaagcttgttcaaaaaaaatataaggtagatgtattagagttaggggaagtgtataagcgacataattataaagagtggacaaaaataagtaagaattgggatcaaggcgaaaattactttagtaatgctgaaattactgttcatgttcatccaacaattgaacattcaggttcagctttaccgaaaagagtgaaataaggtgatgaaagttgtttactggattaggaattagttgcacgatattaatggcagttcttccaggaactatatattttattcataaaaaactcacaacgtatggagcacagccgtggaatactgatgtgcaaaaaaagaaacctgaataatttcaggtttctttcgtgcaaagcatatgtgaagggggataccttctatgtatgctttgctttatacaagccctaaccaatgtaccaattgtgtagagaggaatgtaacaacaatggcgataacggtagggattgcaaacgataagaatgtccattttgcactttttgtttctttgtatatattaacaagtgttgttccgcacgggaaatgaagaagtgagaacaacattgtgtttaacgctgttaaccaagtccaaccattttctaggaatagatttttaatttgattaaaatcatctatttcagttaaagccccagttgataagtaagacattaataaaattgggattacaatttcattagcgggtagtccaagaatgaatgcagctagaataaacccgtcaagtcctaacattttagcaaatggatctaggaagtttacaaaatacataagtaagcttgtgtcaccgataaaaatgttagcaagtaaccaagttaatgcagccgcaggggcagcaacaactatagctcgttttaaaacatagattgatttatcgagtgttgcgcgaacaatggtattccaaacttttggcttgcggtacggaggtaactcaagtgtgtagtgagttggaatcccttttaaggctgtctttgatagtacccaagaaacagttaatgtcataataacaccaattacaaccattccaactacaacgccagcagtaaccaatgtttgcatactgcctgtataaccagcagccataaatagtgaagccattaaaattaacataggccagcgaccgttacaaggaacgaagttgttcgttaaaattgctagcatacgttcacgtggtgattcaatgatacgtgttgacataatggctgctgcattacaaccaaatcccattgccattgttaaagattgtttcccgtgtgcgccggatcgtttgaataagcggtccatattaaacgcgacacgtggtaagtatccgtagttttctaatagcgcgaacatagggaaaaagattgccataggtggtaacataacgctaataacagcaccgataccacggaacaaaccaagtattaaaatgccatgtaaccattcaggtgcatgcgctgcttggaaccaagatgttaaatatccttcggcccatccgaagaattcggcaatcatatcagatggtacgttagcgcctgcaattgtaagataaaaaataatagataaaataccgagcataattgggaatccccagattggagatgtgaaaattttatctagtttttcggaacgatataatttatcagtatttgtatattggacagattctttacatatgcttgcagatgttcggtaaatatctccgactatatcatctcgtatatcttcttttgaaagtgtttgtgcatgttgaataatatagtctaatggaagacctttactggctgagtgagattccattaattacgacctcccttacaagtggttcattatggtgtttttgaagtgtagttaagaaatttttatctccatctaatatacgtaacgcaatccaacgtgctggatacgtatcaccgaacactttataaatttgtggttctaattcctgaatcatattttcaattttttcgctgtaagtaattttaattggtgttggaattagttttttatttgctactcttgcaataacatttagcaaatgaccaatacctactcggtgacgtgctgaaattttaacgacaggtacaccaagtgattttgctaatttcttttcatcgataacaatcccttttttctcggcttcatcaattaagttaatgcaaatgactacattatttgtcatctccatcacctggagtgctaaatttaaatttctttccatagcagttgcgtctataacaactacagttacttctggtttttcaaatataatataatccctcgctacttcttcgtctgcggaatttgagtatagtgagtaagttcccggtaaatctattaatgtataattacttccgttatgttcatattctccttcagcttttaaaacagtttttcccgtccagtttccagtatgttgttttaagcctgttaaagtattaaataatgtacttttccctgtattcgggttaccagctaaagcgatacgatgtttgctcatctgaaatcatctcctattaataccccgaaaataagggagctttcttctttacgcagtgcaatagttgtgttgctcacttgataagcgaccggatctccaagtggactgcgttgcaatactttaatcgtcgcccccgggataaatcccaaatctaataagcgtcgtttcatagttccttctaattgtatcttctcaatttgtacaaactctcctattttaaattcggaaagtggttttatattagccgataccataaaagttacctcatctctatatttttagtttgagtttaaaaagtttcctaaggtaaactttttgttagtaatatagtagactacattggattatgttgtcaattagtactttaaaaatattcatttatttttagaattgttccaatttatttagttgtactaaaaaatattactgaaattatttttaatgtgcataaattaggtgtgtaaaaattacaaaatacagcggaattgtaaatgtaactttaacgaaaagggaaaaagatagaaaaacatttacattgaatttacattgttaagaatatatttacattgcagcgtagttagtgtggtttttgttgggttatttaactataaatgttgggatttctagcttttaaggattattatcgtcatttacttaaaattaaaaattgcttaacactcacataatattgttgtcctacaatgaatttgtgttcgaaagaaaatgaattcgaaaagtgataatccaaatgggggtacaagacatggttatgaaaaaaggtattaaattttctttagcagctttagtggtagcaggagcattagttggttgtgggaaagcagaagatacaactagtaaagaaactgctaaaggaagcgataatacaaaacaagaattatcaggtacgattgcagcggctggttctacagctcttctacctcttgcggaggaagctggaaagaaattcatggagaaaaattcaaaagtttctattcaagttcaaggtggcggtagtggaactgggattaaccaagtagcatctggtgcagtgcaaattggtaattcggatgttccgtccggagataaaataaaagatgctgaaaaggcgaaagaattagtagataacaaggtagcgggtattgcattcgctcttgtcgtaaataaagatgtaaaagttgataacttaacaatgcaacaagtacaagatatcttcactggaaaagtaacaaactggaaagaagtaggcggaaaagatgaaaaaatcaatgtaattaatcgtccggcttcatctggtacacgtgctacatttgaaaaaacgattatgaaagacgcgaaaattaatgatggaactggtacaacacaagattctaacggtgcagtagagcaagcgattaactctactcctggttcggtgagttatttagcaatgtcttacatggtcggcgagaaaaaaggcgcactacaaacagtgaaaattgatggtgctgaaccgaaagttgaaaacattgcgtctggtaaatatccattctggtcttacgaatatatggtaacaaaaggtgaagcgaaggaagcgacgaaagcttacatcgattatgtaaaaggtaaagattttgaaaagcaagtagaagatatgggctacattccaatgtctaaattaaataagtaataaaattttatggggctggctgcaaggccagtcctgttcatttcaatctgtgaagtggggtctgtcctgtgatgaaggggaaaaaacaaattaattacgtaaaaagtgaatatataggaagatcacttgttacgttttgtggtatttttattgttttaattacattagctattattgcgtttatttgtgggaaaggtattcaatcttttacacaaagtggtatctcatttactgagatgttaacatcgacaaaatggaatccaaatgctgatcaaggatccttcggggctttaattttcattgtaggttcaacggtggtttcgttaggtgcggttattattagtgcaccaattgctatagctcttgctatattcatgaatttaatttcgccaaagtttggaaataaagtattgaagcctgttctagaattgttagttggtattccttcggttgtatacggattattaggtgttacgattttagtaccactattacgtgattcgtttgggggagtaggctttagcttaattgcaggtattgttgtattaagtattatgattttacctactattgctagtatcgcttctgatgcaatacgttctgttccatttgattatttagaagcttcttatggtctaggatcaacgaaatggcaagcgattagccgagtaattgttcctgctgcgaagaaagggattttaacaggtgttgttttaggtttagcgcgtgcttttggtgaagcgctagcggttcaaatggtaatcgggaatacgattaaattaccagaaggaatatatagtccgacagcgacgttaactggtattttaacaatggacatgacgaatacattgaacggaactgcttggaacaatgcgctatggactttagcgatgattttacttgttatttcattcctgtttattttagtaattcgagcgattgggcaaagaggtgagcgataataatgaatgcaagaacggtaaataaagtttggacaggtatcttttatgcggttgcagctttagttgtagctttgctagtgttcttagtatttgaaattttacaaaagggatggggattttgggatcctaatttcttgtttggagaaccaagcaatacaagagctggtggtgggattggtccgcagttattcaattccttctacatgcttgttataacgcttattatatctattcctcttggattaggtgctggaatatatttagcagagtacgcaaaacaaggacgttttttaaattttgttcgtctatgtatagagacgatggcgtctttaccttctattgttgttggtttatttggtttgttagtgttcgttacaatgacaggttggggatacacagtaatgggtggtgctcttgctttaactattttaaatttaccaggtttaacgcgtgtttgtgaaaatgcgatttcagaagttcctcataatgtaaaagaggcaagtcttggattaggtgcaacgaagtggcaaacaatcgctcgtattattatcccatcgtcattaccacaaattattacagggattattttagcggcgggtcgtatatttggggaagcggcagcattaatttacacagcgggtttaacatccccgattttaaattcagcagcggatttatcaagtcctgcgcatcctttaaatccgtttagaccagctgaaacattagcggttcacatttggaaattaaattctgaaggagttattccagatgcgaagttgattgcgacaaaatctgcagctgtattaattattatggtattactattcaatgttatttcacgcttgatagcatctatattacacaagcgctttacaggaacgaaaagaaaaagtaaaacaacgaaaaaggtaaaagcggcataaattataaagaagaactctctatttataggtagggggttcttttgtattttaatatagaaggaatggatgtaatgattgttgaatttgtgattaattataaagaagaacagatgtaatttggattgtggattctagtaaacctatagagcaatatgtggaaaaaatgatggattttatgaataaatagagagaaggcgttatcttcatttgtgaaggtaacgccttttgtttttaaatatcaggtgtttctgtagaagtgcttattttcctacgggagcgtctttttctcccgattttatctaatagttcatacataactggaacgactactaatgtaagagcagttgagactgccaaaccgccgatgacgacgacggctaaactttttgataccatacttcctgcttgggattggccaaataggagtgggagcatagcaacgattgttgtaatagctgtcataataattgggcgtagtctagtagaacctgcttcaagtaaggcttctctagtttccattccgtgttcccgattttgttggactctttctattaatacaatagcgtttgtaacaacaatcccgattaacattaatgcgccgatcaaggaatttacatcaacaggtgttcgtgaaatgattaatcctaaaataccaccgacagcagctaacggtaaggagaataggattgcaaaaggagcacgtgcttgcccgaaggtgataaccataattaaatatacaatcccgattgcaatccccataattttgaataaatctgtaaaattctcttgcatagattcagtagctcctgcgatatttacttttgcaccactaggtaaatctaagtcagtcatcgctttatttactgctgtgtttactttactcaaatcttcatttgaagcttcggctgtaatttggattgtttcttttccgtctttatggaaaatttctgtttgcgtttgtttttctgaaatagttgcgatgtcttttaaaggtattggtccattaataggtgatagtatgtttgtatttaaaatatcttcttgtttattaatgttttcttttttgtgttctatcataatagtagctttttcattattaattgtaatttcgccaataggtgatttcttcataaggaatgctacttgttgcgcagctatttctggtgttaaacctagttgttcagcctttgtttgatcaatatgaatttgccattcttttttagagtcttctaaatttgtttttactttagaaagatcatccatgctttttagttttgtttcaacgatagtagccgcctcttttaaatccgcttcgttagtagctgttacgttaaattgtaagttattgccgccgccagagcttgaataacttgtttttatataatcaagttcagcaggctcaaaagttttattttccttttttaactctttaatatattgatcaatatcagaaccttttttaaagactacgaatatactagcgaggttatttttagttgtttgcccccattgtgcatcttctgcgctagatcccattcgtaaaataacgtctgttatatctgaattagaaagtaatttcttttcaaaatcaaatgctttttgtttttgagattcagcattataatcggctggaaatgtcatgttaatagataacattgtgtcgtcttcagattttatgtttgctttcggtagtaatatataagctgcaattgatcctacaaataataaaaatgcagtaagtagaataatgaatttatgagaaagagcccactttaatgtagcgacatatcgtgatgaagaatttggctttcgatgctttgtttttttgagtagtaaaaaagccataagtggaacaactgttagtgcaacgattaaggatgatagtatagaatatacaactgctaataccataggtaacattaattttccgattgctcccgctacgaggccgataggtaaaaaaacagcgaccgttgttaaagtagaagaagtaattgcgactgcgacttctttcgttgcatcgagaatgatatctttagagaaagaatctttttgtaaacggcggaaaatattctcgatgacaacgatactatcatcgacgagacgtccaaccgcaacagctaaaccaccgagggttaaaatgttaagcgtaatgttagattgatgtagtaaaaagagtgttaataaaatagataatggaatactgacaacagcgatgagtgttgttcggaagttacgtaaaaagattaagataattagagttgcagcaattgctccaagtattacttcttttcccatgctagtaacagcattttcaacttgttcatgggttgaagccaaaagtttaatagaaaattgatctttatattccttatctatctctttaacttttttatcaatctcttttccaatggcaactgcatttttactcggttctttcatgatgattaatcctgtgccttcttctccgtttatatgtgagattgtatcgtagtgttgtttaatttcaatttgagcaatgtcttgcaatttcacttggggtgccacagtgatgtttttaatgtcatttacattttttatgtccccaatgacgcggaggttgtattcttcctgattaacagtaattgccccagctggagtagaagtttcttttccttgtaaaacagttagtacctgctgtgatgttacgtttttgttttttaattggttcggatcaagtacgatagataattcagaggtggattttccgaaaaacataacgttggcaacaccatcaatgttttcgagttgtggtacgatttctttttcaatttgtttttcatctgcttttgaaaaaccgttttgtttctggatagtaatttgagcgagtggaatcatagaagtgtttaattgactaactacgggcttggttacatctttaggtaatttaattgtattgacggctttttcgacttcgcgtgctgcatctttcatgtttgcttttgatgtatacgcaatgtcgatacgtgataatccctcgtatgtagaagaagtaatggtgtcgacgtgttctaaattgcgaaattgtttttcgagaggatcagttacatcctttgtcatcgtttcagcgtcgagtccttgagataaggttgtgacggtaattgccggattgtcgatacttggtaaaaattccataggtaatttagagccggaataaacaccgagtatggaaatgagaaagatcatgatgataatggcagctcggttttttaatgaaaactttgttaacctatccataaaataattcctccattggtttatttatagttgagtgcgtcctttcttactatataacaaaaaatggatatttttcattaattaaatgtaaaaaaattctaacaatatccttaagtttatattaggattggaatgttgttaatttgtaggggggaattttcgaatgagaaggaaggggataatgcgcgcgagtggctgtttaatgtagatgggattttttcttacggctaatttgtatagttattttatagaaggataattattataaaccttaatatagaagagaatgaaaatttgggaaggtattgtgaaattcaatttggttgaatgaagtgtagtagtatacaatcagaataactatttttagtagagaggataatagttatttctatagaagaaagtagggtagataatttttttatatttttataaaaaaacacttgttatttaaaaagtgtgatggtatattaataaacgtcgctgatgcggaaacgcagaaaacgacaaaaaagaaattttaaaacttagttgacatcgaaaaatgaagatgttaatatggtgaagtcgcttctgaagcggcggacaagttctttgaaaactgaacgaaacaaacaacgtgaaacgtcaatttttattttagatgctagacaaactaactttattggagagtttgatccttaaaagataatagggtcataacatggaaataaaaaccagtctatgacccatttttacacgtatctcggctgaacccctacataaaatggatcttgtgtctcaggcttttctgtttcaggtttagtctcaggtttagtctcaggcttcgtctcaggtttagtctcaggtttagtctcaggtttagtctcaggtttagtctcaggtttagtctcaggcttcgtctcaggcttcgtctcaggtttagtctcaggcttcactttgtcttcgctagatggcttgccaagatcttcgggcttcgctttgtcttcgctagatggtttgctaagatcttcgggcttcgctttgtcttcgctagatggtttgctaagattttcaggcttcactttgtcctcgctagatggtttaccaagactttcaggcttcgctttgtcttcgctaaatttttcgccaagatcatcaagtttccctttgtcttcgctaaatggtttgccaagaccttcgggcttcgtcagactcgctaacttttcgacaatgttattggtagaaggttgttcttttgtaggttctaaggaaacaattaatttatttgatggttcagtgttattatggttgattgtttcaagagaaggttctacaggttctataacatctacagttttttcttctttcactattacatcagaatgaggttcttcttgtttagttttatctgtttctttttcattacgatccctttttttgtacttctctacatttttttgatttgaatcttttgcttgttcatcattattttgagtcattacgactgctgttgttacaccgccaccaacaactacagcactaattgcaccaattacagcttttttacctatcaaaatttttgtgaataatttactcatttttactaacccctttttaattgtatttttataatatagtaaataattgcttataggtatataataaaccatatgtgttttaaaatcaacaaatatttaaactaaatatggtttattttgttgttgtaaatctagtgtagaagttaatattaaattaaaatacgcaatataacaatattaggttattagctaaaccaaatgtagtttatttttaaaggtttattaagtataatgaatataaaggaaggagattatatgcatgagtaatgaacagaatcagataagtcacaagaaagatagaaaaaatagcactaaaagtatagatcagcgattagaaaaattagaaatgacattaaaattacttgatatatcttttgatgaattagtaggccttgttacgtattatcgtgctgaaaagcaaaagagtgatgaacctatggaacgatcaggacaactaaaatggaatctagataaattaatgttagaaatgaatttaaacatagatcaagtagctactattgtaggtctacatagaaaccaaatagggaaaataaaaaatcatgattttaaacgtacagatctaaaaacaatagaacgaatttctaaaggattaaatgtatcattagatgaattatttagatatgaaaaagatgattcagtctaaaaagaaggtaactcatttgtaggagttaccttctttttttatgtgttttattaaaaatggtgttttcatcaataattaagtttatttttgatgttttttaatatgtattcattcaggattctcaaattagtttctataggcattttgtttgattgatacctattgtattatggatgcctacaaaaattgatacaagttaatctgaagtgtcattttttcgttaagtatattatattttgctggaataagaaaaaaagttatgaatttataaatagatgaatattttattgttttttaggttttttctttaatggtaagccataatgtttagcatttttaattatttttttagctagatctttagcttccgttttcgacatattcatacagttttcctctcccctactgttttattatttgtatgtccaataagtaggggacttaaacataattctgaaaattaggacatatattatattattccttaggacagtaagacactgtacaaattcttaaattacaaatttgaaaggagaatcgaaatgattgagcaagagaggaaggtaagaaaagataaaaaagtagatattaagccgacaatttcagtagatctcaaagaatgtatttacagactttcatatattacaaataaacctgttaaagatgttgccttacatatttgtgactatgctctccattcaaaagaaattatggagatattatcggaaagttttcgtagaaacttaacgatacacaatactctgtatatgggtgatttgaatagaacatcattagcaaaggtaaaaaagaaggaagattacccaaaagagagaatttctttacgtgtttcaaaaacaacttatgaaaacatttgtaaattgaactatgctctagatgttacaccaactatggcaactgctattttattagaaacatgccttctatattcagattatgtcaatgaaaacgctagatcttatcttgaacaaaacttggatcttaaacgtataaaagaattagaaaaggtaataaaatatgtaaatgaacataatccatatgaagaagaagtatcgtggggggctttattatcatttttaatggatgaaattaaaacaggaacgactaatgttgctcaattaataaatgattggttagattcatataaaaaattgaaatgacaataatcccttaatgattatttggttttcttatttatttataaattagtggtacgtgaaattttatatattatgaagataagtcctaaaaaataagcattgaatctgattcaatgcttatttttgtagttaaagtgataaaatcttttaaggctttattactttaactagttgttctccttctataatcttgaatttattgtctaattcacttgtctcttcaattactctgacactcttttcgattactttgacattccttatatttaattcttcaataatcttttgatattctttatactcattttctttcattacgataattggttgatttcttgctacaatcttgaattcgttacttaattcatctgtctctttaatctcaaacgatatatcttccagcctattaataaccgaaattagatctttccatctttgttttcttacttcaaaattaattattgtaggagaaagccacataggaacatcaatttctatattattttttttatagacttgtaggaagcaatcctcatgatcctttcgaatgacttgtacttctaatctatattcaccaatttcacaaaagaataccacttcattattttgatgagttgtatcttttaaattaataatatcttctttaaaaaattcatctgtctttaagtccattacacttttcctccctttattgttttaaaggtacaaatgacttaatacaaacgctttattactgatatataaattgaacatgtaatacagaaacagtattttgttttgtttcagcattccagtaaacattaattccgaaataagttccaccataatctttttggatcattttatcaataactttataatcattagaagatgtattgaatttttgaatgtttactgattctacagcaacttttgttcctttaggtaaaaatgaagggatttttgcatcttcccaaggttctaatgttccagctttcacctttgcatcttcctctgtgatcttaccgcttgcaatatcttgattcaagctatcaaagtatgatttctttactcctgtatagctaccgtaatttccaagcttttgacgtaatgcactattttctgaagactcttttggaggtgcaacataatatggtgaattcacttcatcattgttatttccattgttattttcattattgtttccgttattgtttccattattgtttccgttattgtttccgttgttgttttcattattgtttccgttgtgatccggctgttttttcatagtattgtataaaaattgtacgtattgttcacgtttcacaagtgtttttggctcgaatgtgttatttcccatccctattgaaataccatttgattgcaccgcactaattgaatctgtagcccaataatttttttctacatcatcaaaagtagtcatagattttggttttaatttaaatgctttcgtcaaaacagatgctaattgttcacgagttaagatgttttctgcgccaaaagtaccatttccgtacccattcataatacctgctttttctaaagctttaatttctttttcaaacatatgacctctaatatcagaaaatgaacttctaaagcttccgtctacatctgctggttttaaaaagttatataacattctagcaacttgaccacgtgttacattatcaccaaaaccaaagatgccatttccataaccaagaaaaatttgtttacttcctaaatcatttatagcttccgtagaccaatgatttgctggtacatctttaaatactggtgtttctgcactagataaacttgcaccaaagaacatactacccataattgaaaatgctgtcgttgtttttaataatttgtgtttcattataaattcctccatttattataaaattagaccatttgtatattatagcaaattgatataaatgttttatccctatagtcaagattctctccgaaaaatacaagtccctcatattctaagttctctagataattggctacatagggatatataagcggttttcccgaaagataacgttttgcgttacttcctttatgttctattaagaattcacataattgtctggtactaataatttcatgttgttgtataaaagatttaataaaacttttttctgattctgataagaaattatgtaatactttattataaattggcttagtgttaaatccctgctcgatccctagtgtcattacttcatcgaataaagaaatttgattaggttctgtattgttaaattcaacagattgaagatttatttcatgcttagtatgttcaaacaagattcctattaatttatttacttgcttatctaataagggtaatttgagttctagatgttcctttatatcccttggaatctcaatatttaatggaagttgaattccttcattattttctaatgaccaattgtttctaagttttattaatatttcatctaactcataatctatcttagtcattccctctataacttgtttaactatttcggctggaatattagtatgttcttcaaagtgacttttaccgaattttaaaattttatttgtctttaaattttttacaatgtattggtaacgtaaagagcgtccacattcacattttagtgtctctgtaacaacacctgcatctatataatcaactaaacgccaatttgttgaaatgtgcttgtagtcttcctctgatccttctcctttttgttgtgccaatatactagcaaaagcggttttctttcctctttttaaaaaattcgtcaaatattcttgttgtacatttgataattctttaaatagaatatctctctccgtctgcgttaaatatttagctaccatatttcacacctcttttatacagccattattttaatcataaggtctatatttcaagcgtaactttttatactctaattctttttctaaaatataagagcgcataaacaaacacacactcccgacttttttcaagggttttagcttaccttcacgaattaatctatttactctatctcttccaatatccaaaatttcggctacttcagaagtagtgagaacttcatctttaataaagttctccatttcttctttagaactaaatttccaattcatccgtatcccttcctaagaaaaaatttattgttcttaataccatatataaactaatcatagaaattactactaaatcaaatttatctactttgccaagatccattgttgcaagatagaggatactagtaagaagtatcccactatctgttttattaatttttaatgtattgatgttcttcattttaaaattaggtgattagtgtgttataatatttctgtggggaactggctgtcaaccttccccacagataaatggttatcggtgcttgcgttctttacgctggcactttttttgttttgtagtctttttcttagctttttttctagctttagcttttgcctttattttggtatgtatatctaaacttacattgataatccccaaaaagctggcaataaagactacaacttttgttgctatttcaatcacctatctccacctccttgattctattataccatacctgacctaaaaaaagtataggtttaagcaaaataaattcaaaaatataaataaaaagatattgttttttcgttgtctttaaaggggttttatgctttttggtagaggctggctcgtggtgtgcggacgaaaccgcacgatcttagcgtatgaacatatagagtagagaataattaaggatcggaagtgattagcggttcggcatactaaaatagtttgcacaagctgatagaaaaccttagtaactttttggtcttcagcttggcaaaagccaaaaagtatgccgaatttctttcgtcaagaatgtgaacagcgtgaacaaaggtggagatttttgagtgttctttactcaaaaatactacctgtttcttgatgaaaggaaagccctttgatgtatacagtatcttttcctacaaaaaaaacgaaagatttatctctttcgttttttgtatataaagaaaatgagagtagttgttacttaatttgactttctatttctaatttcatttttttccattacactacatagttttgctaaaccataaaacaaacctattacacaaaaaagtattaaaaaaggtgtaaatttttctacagcaaaatcccgcatgatttcttgggcttgctcgggttttgttatgatattatgcctgaatgtcaatatatctatattcatttttacagtagctacacaaacaagtacaatgggacataagatagctattgccatcattaaattgttcaacaaaaattttaaaagctttttcattatgatcctccttgtaatttatattttgtttttataatacactcttttatttttatttatatactttttatattgttgtgtactttttactagataataaattgaaaagagaagaagtcccataaaaggaatgatgctagaaagaataattctagcaataagagagtctagatccgctagatacatataaatgaaacttccttgtatgaggataattgaaagagagattataattatatgtatgtatccagtcctttctttttttaattcatctagttgtctataatattttcgattactaattttcggtttcatatgtaccctccataaagaaaatacgaaagcatttgaatagcaagtaggcatttgcctacttgcttttttatgttttttcttttccggtgcgtccagcatgtgccttggcaaactcaggaggaacttacagagagtagcgtgagcgtactctctgtagttatccctgtgtttaatgctgtgagcgacacatatctccttgttagcttctgaaacgcctgtacaggctttcaggaggttataaggagtaagtgccaccgcccaaaggatctaatgtttaaatctttaaaattgaattaaattctacagaataactcttttattcaatcctcatgcttcactttattttccatccatcttgctaactcgcttagttgaatatcctctcttttaatatctgtttctgcaatatacggttcgacaacacaattattcaatttactatttaaattaatgtcaagaggattaattgtagaggttttattttctagatttaaatttattattttgccaccaaatttttcaattattttattataatcagtcataagtttatccattgttcctccccatttcttaataaaatttaaatttgattaaaccctactatctaattcagtaggcttcaaaaatcagcgcaaaaaacataaccataaaaatcaaaaatatcaaaaaatagacacatgaaattctcatatcatctttattcatattatctgcgcccccttctttgtgaagaatttcgaagcctatttatcttttcttttttttcagatttgtgattagttgaaccgaataataaaaaacgcaaaaggaaaaacattgcgcctaaacctaacaagctacaaaaaacattccaagaactaagatccaccatcatattattttccgcctttttttctataacattcaaatttgattaaaactctgcaaagattcttctatttattgttcattttcaataatgtaatatccttggctagaaattgattttatacgctttaaatcatcaattatccttgcatttaattctactatggttctacttcccccatttcgtccatcgagatcatccaattcccatagcaaacttttctcaccatcaaaacccttaaattctgggttaattccttcttttaaaacttttatggcatcttcacaagcatgaactagatcttcaggagaaactaattctaatttctttgagtttggaggttcaaattgactatatatcggaatatgtattccataatttgcgtatacagctcttaatgtcccacttgttgcgtaagtaaatcttaattcgccttgatcaaaatatcgtatcatctcattaaaatcattttcttcatgttctacgatttcaaattgtttgaaataagtccaagttactcccataaattattcctccctacgttttatacaaaattcaattgtccttttcaatcattctctctatctcctagcttaaaatagatttaatctacgtatttaaacgcaactggggaagctgttaattcaagataaggaagctcattcgcttttgcttgtctacaaaactctttaagaagtgtcattccttcttcgatacttaatattttgtagaaattactgtttatatcatcaataaagaattcaattatttcaacactatcaaataaagagttcgagtctatttctgtaattaacttctcattgtctatatcaatttttacagacaaataattcgttacaccatcaagagcatcctcttcaaatttatgagtattaaatttaattgtcgcatcaaaagaataatctgatttcaaatcattataagtaaaaccatcccaattaaaaatatatccatatgctatcttcttattttcccctttactttcttctatataattgacgtgttcttcagtggaattttttttattttgttcaacatcatccaattttctaatttctttacttgctctccaataagaacgaatagctgacattgcatgttcttcatcaggtacgtttgctatctttaggtaacatttaccctgataagctattacaaattcaccttcaaaatcccacttttcatcctgctcaatttccctatataatgaataatcatctccatctctaccttgaattaaatagtttggtattttaaaatttaatcctttaaactccgcttcgggtggtacaatcactttcgtagttactgtatccatgattcattcctctccttttccaagttgcgataggtaagactttgaagttatctccatcttttcccccgcttagcactgtacgtgcgactttcatcgcatacagcgccccatcttattcttctatcctaaagcaactagattacaaacaatgttgtactcaccaacgtattcattcccttttcttacgaaaagtcacatcatcttactcgatcctgtgagttacatccagttgatttagttttcaaagaacaagactagggactatccctccacattcgttacatgcttcgtcggtactgtgtccccaccttcacaagaatgaagcaatttcggttcgttagaaccttatatgcatctgtccactagtagacgttcatgacagtttcttgcttaccacgttccgattgacctagctatacatatatccttaggtgcttgctttaagcctgttatctttacatcctcattgttagatgttccgaatttcatatcatttactcttacttttcggtagataacgtcgtcattgacgacatacacatttctaatgtattaatagtttagacccgtacattcgcaagttcgccagtccgttaggacattctcaccttagatattttgtagcatcccgacctatccattaccatatgatttctcacttaggttttgttcagtcgacttcacctagcttcatacaatttgtgactactatcacgctttgcatgtaggagtatcagataagtagtttcagctcaacctgacggctttcattcctactttcagtcaatcagttgttgttatcaaattgataaccctcctatttcgtgtttgcacacttatgaggaaacgtgtcgcacaaataactattttgtttaaatttcatgtagttcgccgatataagctgtaacatattgaatatgagattcttgattattttttccgaaacatgtctctattcggtctatgcttatacttggaaatctttcttccaataagcttatcaataactttttattagtatcgttatctactaattgcaattcgttatcttcttttataaggacgaatccccgatcacgtaattgttggattttatctacttcatcttttttatctgatattggttttttgctaaagattctgctaagtctggttaaactaaaagcgaactttacattcaatccaccatactcagtgaaggtcatttcagaaatatgattaaatccaatttctctccaccagcctttaattttattagttaatgcattaagttgttcactcaaaccatcaataggcttcatatcagccatctttttttctagttctctaatacgtaaatttgcattcctaagatcattactacgtctttctcgttccctagccaagtcagattcgtaatttgtttctttagctataactgaaatatgactttctgataaagaaataagtgtccccttcatttcctctgttaacttatcttttgataaccattcatgcatttgttgtgctgtaaaatataaatcttttaatctctttaaagtgaccgccttttgatcttcattcaaaacaactaatgtttcttggtttcccatctctcattctccttttctcgttttcttgtttttgaataaatcctgtacgctttttattttttttatctttttttataatttctaggtacatacttagatatatttcattcataaacttatctatttttactccctccgatctcgctttaatcattgaaagatataaggaaagtctattaaatttgtaaccactcttttgtgagaattgtcttcaataaattaaacttagaggtctttttatcaagacaatgtatgttagcacgatccgcattgtacccctttatacataaatgtatcttctcttgaaacgaatcagttttagtagatgcttcgtatataacctcgcatccaacctctttattgtctttatataaaaccacagtgtaaatgttaagaatatccttcacactgatccctcccttaattacaaagtaatgtaacaatatctactgctgtattatccgctacttgataatacatttctaagccacgtctttctgattttaatactctcgtactttttaattttgctagatgaacagatacagtagattgtggtatatctaattgtgtttgtatttgagttacattgctaatcttacatgaaataaggtatcgtactatttgaagacggatgggatgccctagagcctttagcatatctactgatttttctgttacagtttgtaaatttttttctactagtttcatattatacattccttttatattaattttgtaatgttgttaactaataatcttgtaaacatttgttctataaaactcttaatctattaaccataaagtattcatgaatactttatggttaatagaacctacaatcttttaatatcataattacattatacactaaatatagtttaaaataaacaactttataaactgtatttagtgtatttttagtgtcataattaaaaggaggagatataacctcgtccttttaattaatcacaacttgagctattgtcattgctactatcattatagttattcgaggaattatcaggtgaacacatcccacttgatttgtccgatccattatcattgtctagtattatgttattaatagtgcttgctgtgattaagggatctactagatcactagtatttctatgttttttttcctcagtaaaatgatgtacgtgtgattgtctattggaacgtctaactatattggttttgtcgctagatatttcaatttcttttttatccatgcttactttacaagatttcaaatttttatctttcatataatttacaactttatctacgtcttttcccataataggttcttcctcttgtttaaaaaagagcgacaatccttttgtgaagaaatatcccattaaaacaaccaaaccgagccaaacaaaaattcttattagtaaaaaccaatcaaatgctagattttccatattttcatgctcccttcatttgaatcttatttacacactattcgaattcatcaatacggaaatcctcataaattttcggttttttcatagttggcctattcccttcaaattcaacattatcagaccaatttatttttacttttttataaaattcttctaactcttttgatgttaaaagagacaataaaaaacacaactcactttctacctgaagtaaacctgaagtaatatatcctctttcatattcactttttttacctgcattactaataaaatcatgcatacctattaaagcaagcatccgattagtaaatttaccactgttttcatcgttattaaaagcttcatattttgcaaacatataatcattcctttttatagtgttcttaatcttttatccaaaaatccatattcctataaacaaataagcaaaaagcgcaaaaacaaatgcaaatccaaacactagacatttaccaaaggacatacttttatgatcttccactgattatttttcctttcttaatgaattttattccgtttctagcaataacatatttttaataggggattctgtttcaagttctttcccatcccttatccatataacaacgtcacgttcactatctaaccctctgtttatagtttttacacatagggctacaccttcattttttgagatgatatttcttacacgttttccttttatatcaaactcttttttcatattctcactccgtcacattctctatagtcccaataaacataaagttgacattatcatatttgaaaatttctattttattaactccttcttcatttacctctagataattacataagatggtatttgccatataaccagcttcctcttggttttctaatagatagctatcacaatctacaacagtattatccttctttgctacaaatgaatatatatctttcaaaataattcatccctttctccaaaatccccgttttttttgatataaaattcaaacactaaaacttttggcattctccattatactaagatttaatttcattaggttttttaaataaaaatcgtaatacaattataattgtccaaatccaaagtattactttaccaatattaagcaatagatatgttttattttgcattccactaactatatttgttgatacagtaggttctgtataaaaatccagtgaaaatagataagtaatagcttctattaatcccattctagcctgtgctgggaacacccaaaatgtcatcggtattacaaaaaacacaccaatccaaacaacagccccccaatcaatctgtttgatattatggataggtctttcaatcaaactcatgttatttatttttttcatgttcattccaccttttcaaaaaattattttataaattgaagaatacaaattacaattaagcaagtaagcattgctggtagcataatttttaattcatccggtaattctttctccaaaatagcaaatattagattcactattattgccaaaaatataaatagagctaaagatccaagaaacattattggtatgattgataatgaattcatttattttctccattcaaaactaattactttttatatcgttataccatgtattgctataagcattgtgcctgtcagatatatcataaaaccagctaatgcaaacatcttaagaaattcgttatttttttcactatgtccattaagcattctataaagaacactagcattaaaccctaataaacataaagctacaggtataccaatataccactttcttaaaggagcaaatatccccgaaaccacctcttgtatagccatttcattcgttaatccagcttgttgtaataaatcacccattgatgataaagcaagaaacattaaaaccatgaaaccaaatatactaaaaaacttactcattttatatcctcctagttccaaataaaatttgattttaagagagttctttaattctccatactccctctagttggtacttgttaacaagatattttaagaaatcaaaataactttgtcccgattctttatagtcccatgtttcatctaaaagggtagtaattacattaatttgtcctctaacgaaactggattttacatgatatttcccatcattttctgatttttctattcttataaactcattaatccgttcagtaagcatttctctaatagcttttgaggatagtataacttccggtatttccatactcatattttctaaattaaaatccttagcttcttgcttatgatatttaacgttcttattagggttttgtgcattataaaactccctattgaactctcttagtttattcaattcttcatctgaacaatgcttccatatcataccttcatctaatatcctttttttctcttcacctagaagtcctcgatcccttatctctttcaccatattttctaaggcttccaacatatcgtctactctcattttttgacctaaaatatctctattattttcaagaaacctcatgtacctttctaattcttctaatttcatcaactcatatcaatcctttcattttttatttaaattattactagtaaatacaccttcagcttttaaaaacctttcaagagcatcatataatttcatttcgttgctattacaatactcttcattgtcgtgaagaacgcttgcttcttctaatgtatccaaattacgccataattcataagacaacttatgtactttcttacgaatttctttaagatcaacagcttccattaaaaccactactttcataataaattctaaaactattaattttttctatttaacgccttttccaaagcattttaaacaaggaatttttatacctgtttcttgtaatccaaaaccaaatctatcttctttgattgaataactcttgctaaagacaaacccttttccattacaagatttacattttctaactctcatttctcttatccctccaataagtattcttgaatacctccgtttttaaacatccaaaaattcgcttatctaaccgactatcttattatatcatattttattaataaaacaaatatagtttattgataaaaataatgtaaactacatttattttaaaggggtgggtggtgggtattgatataaagaataagcgtagcttattttcaatgcctttatataaaaaatgagaacaagattttctatctcattctcattttttataactacttgatatattctccaaagctaaatttttcaatatacattttttaagcataggcattacaagttctaaatttaaaaataccataaataaaattttgtatgtaggaattgaaaattttacaagtaccgtccataacaaattaagaatagagtttgttacagttgtatttgtcacatggttaagatccaccaagaaacggtctattatctctacattagagataggcattacacataaaaaaataaatgacacaaacaaagtaaccacaaaaggtttaaaaataatattagttattgtttttggtaagctaaatataatgaccacctactttgttaattttttattttgatatataagagaataggctacattgtaacagttattccctatcttatatcttatttattatataaaaaacatacaataaatatagtttaaagtaaatgtttatttaaaacacatttagttatattaataaataaaaatggaatcattagattccatttttatgctcgctttaatcttttcttcggctctttcacagttctacttaatacatcaaaggcttcttgaatcatttgtttttcatcttcttttctttgtaagtacaactgatactcttgaaccaattcttccgcccaatcttcaatttctttatcttggtttggttgatagtccatgacattactgaatacaggaatatcagcatatctttcttcataattaaattcatcggctgtttcatcttttaattcataaacaaatccttttaaaacttttttcccgttttccatatcatgaatcaactcaaccataatttcggttttttcatcatctaaaaatacttttcctaattgcattattttacactccttttaaaatagtttttctaaatctaactctaactgaaggagatcactttctattataaatgaatcttcgctttttatatattgtccaccttctgtaagtttgtaaacatatgctttgtttttgaactgatccagtatccaatattcctttacaccattcttttcatataattttacgttctccactagatctttatccatattagaatgagataatacttctacaattaaatccggtgcgcccacaatacaattttctcttactatattatgatcagaaacaacaactgaaagatcaggttgaggtttggcatgtccaaaacgtccttttacatttcttaaatagacagtgtagggcgcaaaaatactgacatgcttcatttctaattgttttcttaattcataatatacattccctaatattaattggtgctttgtactaggtgttttatgctgattgaaactcatgtgcatattcccccataaaatcattttttcatttggcttttcatagaaactttactttacatactaccaatagtataattcttattaagataatagcaaaagacaagttgcaaccttgccttttgccaatgctgtttagagtgtgagggtcgattcttgcactcttttatttatgttcaatgaagtccatatacatttcacatttcgggcatttctttttgggtatgatttcactactccaatcaccttccttgcattcttcacacacgtattcaataaaaataaaatccctatgctcgtgttcctttttctttttattaatagtgatattgaacatatgcatttgctaaaaaccccaagtaatgattgatatctctattataaaaatctatttttcgtatttgcttttcaattactttttgttcttctattggtgcttgtttaatcatatctataacaatttcattttcaattacatgtgtaagtcctttatgtttaataacaaaaatatcacttggaatgtgcttttcttcaaaaaagcgttcaataaatgtacgtgatctttcttttactgtatacatattatctcacctcctttttttgtccgtcttcaaatcctaaataacatgctataatctctaattttcgattcatattttcttcccctatccattcatataattcttcttcaatctcttgtcctgtaacaacaatactctcacgttgatcgcacatactcgcaaacaattctatttgttgattcgtataatccatagcattatcccattcggtgaataaatgcacatgctgttttgattcttctagattccataattcttttacaacaataatttctgtatttttcatagaatctaatatataccctacatgccattcttgatttttatctgatttgaaaattaaatttacttctccatcataaggatttagtttaataaccacgtcctcattcatttctttagcaaaagccttataacaaaagaatccagcttcatacttttgatatacaatgtcttggatctcaaaagtattttgtctttccataaattcttttagatcttgaaagatttgttcttgcatgttttttaatgttttcatgttttttctctccttttttttgcatttgcattacgcaaatgatcttcccaaagggaattatttttgccatttgacatgaagcatggaacatccgcataggaaagttggcaagggttttagctgaaaaaattttatgtccgaatttttttcatcggaataaaaatttttcagccccttgccaattttcctgaatcacttagcaaaaaacaggttaaaccgaaggggaaactttgacctgttttttgcttagtgattctgcggtatgttacagtgcgtagtgcaaatgcaaaaataatataaataaaaaaagtaggcgttagcctactctccgcttttgatcttttgttttttccggttcgtccagcatgtgccttccttggcaaactcaggaggaacttacagagagtagcgtgagcgtactctctgtagttatccctgtgtttaatgctgtgagcgacacatatctccttgttagcttctgaaacgcctgtacaggctttcagaaggttataaggagtaagtgccaccgcccaagcctaaaaaagcacttattctcccttttagaaagaacaagtgccaatattctaattatttatcataaaaaatatctaccctacttaatcattaggtatttcaacagataaactcggttttgctggtgatggtgtttctccaccattaagtgacgcttgttttaaactactaaaactattgatactacatgctaaagtacctactaataccatgcctaatacaattttctttattttaatcattatttcaacgccccttttctcaaatgtttcttgtctgcattgttactgatataaaagtatttacttgctttaacatgatcatcagtttcatagaattgaatggccaacatttcggcatattcttttacgcaatcccacattccttctttttcaaaataagaaattgcatctgtaacaacttgttctaaacgtgctttaggtaattctgtgactaattcatttataactgcaaaacgatgcttatattctgcatttcctgattgaattgcgcttttcattccttgttctatatgttgttttgctgtttcaatatcacctaatttataatatgctctcgctagaacaaataatgctttataatgattcggaattttatttacgatttcagaactatgtcgaatagccaattcatataaatcttcaatatggtataaccatcctaaattgtaacgtacctttattaacaaatgttcttcatcattctttttaagaacatctattaccttattcagacattcttcagcccttccgaattcccgtaaatctatacaagctatactgtataggttatcacataatgcatgattgatttcatatcctatatgatttgaaaacatttctttagcctttaatacatgctgaataccttcaaatggttggtatgaatgatagtaaaaacttgccattctatattcaaattcagccttttcgatttcatcaggaatataaattaaaagttcttccgctttatcataatgtgcttttgcatcattgtaattggacaaaattgtagaatgtattgctttaaagaaatgataatagtaagccaaaaataaatattgatccttgattcccgaaagttcttctaccttttcaaacgattcctttgtaatattaattccttctactaacactttacatctaaaatcaagtagtgaataatagagtgaaagatattgatctgtttcaatttcttttaaattttcttctattttcatttttaactgattggatttctcgacatgatacaaacggatttcttcataccattcattcaataatcttattaattgctctcttccttttgtctgaatgctcataatatcccccttctttctatatacagtcttaattcgataataacaggaattgggtacaatgaattttactacaagatttctcataaataaacagaatattctgaaataaaaaagacatatcctatttttttatctagggatatgtctaaaatgacgaatcataactattataccgaattctagttgtttataaaaacattatgttcactttatattgttgctttgaaatattgattaaccgtcatgtataattcatatacagggttatgggtaggtaaatattcaaaaaaggatggaagaatgtatatgataaaagaaattccatttcaagaaggcgaaataattctttttaaagaagcgaatttgtggaacgatttgcttgaaagatgcaaaaaagaaacaaaaacgattaatatagcaacatacaattttaattttaagaataaatacgaaagatccttttataaggagttatctaaacttgctaatttaggaattgatgttagcttactatattcaataatgactttttctaatgaggataaattagagatagaagaaatatttaaaaatttcgtgttgtgtgcacagctaaaagccaatcactcgaaaatgtttattacagataatttcgcatacattggttcagctaattttagttttagtagtaataataattacgaatgtggtgttatttttaataataaagaaattgtttcaaagatacggaaactattcatgggggaaatgcttgaacaaagcgaattcacaaatgtccctacatcttttgatccattttattttttacctagaatactaaataatgttgaagaattaagtaaagtagaaaaaaaagagtccttgtatattgctagtaatgtagaaaacatagcacaattgcgttatttagatgatttagagaaaaatttaaataaactaggttttccaatacctatacattttgattggtggaaacttttttgggaacttgaggaaaagaaaccaatacctgatatcacatttaataattttaaaaactatctctatgcattatctcaatacttaaacactgtaatagaacatgttaacgcacagtatgagagcatcggaagaatggaattactgaagcgaattaaagtaataaaataaaatatagacttgaaataaagatcaatcaacctttatttcaagtctatatttagataaaacacctattttgtttgttccgctttaatagtagaaataagagcgaatgtaatcacatcaaataatttctcagggcaattggaaacgaaatgtgcaatcgcaatttctatcacttcgccaactgtttctacatcttttgctaacattttgattctttgtctttctgtttcatcaattctcacattcaatacgactcttttatgtgagacactaacttcttgatggatgatttctttcaattccttcattcttttactttgtaaaaacggttttaatgatgctacattatttgtctgtttaaatacatcatcaatcatcattttcaaaaactcaggcttattagtcgttgataattcagtaatggtagggtaattaaaatgttttataattagaaattcagtaaacttagatctcttatatatcatgtaagttgcaaggaaaacataattcatgacaggatctattttgtacgatttgttaggtattgtattgtttgtatccatttttcctacctctccaatacatataaaataaaaaaaggaaacaataacgagttactgtttcctttaacaatcaattagttcgataaaaatcaaaggtattataagcatcctctataatctcaacagtaacgatatctcttttgataataccatttttccatttcgctgtgaacatgaagtaaatattacctttttctaacttcgttctcggatcagtcatggatggttcaaaaatatcaagattatatattggatgacttgaatttaaaggctttctaataatgagatcctgtttgtttacttgcattcctttgaattctaatgtaacaaattcaatcggataatttgttacaatggctgacgtaacaaatttttcccctgatacaaattgctccggtaaatggtttagctttttatgaatttcttgccactcttttgtatgatccactttccctttaatactaagtggttcagctttaaaagagactttcgcttctcccttttcaccatgaggatctgttactgttgctttaaattcatacgatccatcttttatcgaatctattttatattgtaaggtcttccctgatatagctttcttttcttcaaatactttcttccagtttccttgattctctttcatttctaggataacttgtagcttttctttatctctaggatcttcatcactcggtaacatttctaaagtgacattatctccttcaaatactggattagggttatatttcaattcaattttaggtactgtatttacatatgggttagtggaaacttcattgtcgttttcatttatctctttaatcacattttcatcgtctacttttgctcgaaatgtatgatcccctgaatcttcagccttgaaagtaaaatattttgtagccttttctccttttttcatgctcttaatatctattgtttgtagctttttattgtcttggtaaaatgctattttaaatgcttttacatctaattcaccatcattaataaagtctactttcgccttatattcttggcctttaactaaatgattaatagctttgttatttgaatctaaaatagtaatagattgcgcttttaagtttgtcgcccgaatatctccaacatactcaacttctacatcccattttccgcttgtatcatactcattccaatgatcaaatacttccttagaaagtttacctttataagttgcttttccagtgaaatctttgagaatatcaggcaagttaaatgttcctctatattcctgagcatatctatatccttgcacttgctttatataatcaatccatacacctttacgatatctattagtcctccccgattctgatttccaacgataaccgaactgtgctgttttataatgccatcttggatcttcagcatcttgtacgtcccattcatcccatccccaatcctcaactatccaattctccttatcaggctctaatccgtaatatgtatcaggtttaaggggtttagaatcactgaagttatacatatcaccataataagtatacgggttatatgacataaatcctaaacgactatttccagcaccatcatagtattcagctcgtccctcacttcggctctgtatccacattcctttagaatccaccgaatatttatcacccaattgaggaacttggaaattaagggtttgtccacttctttcatcataatagttcttcgatatactagatggtgctggcgcttgccacgaataccttctaaatatgttgtcttcccaatgtccatctaggttaacagttctatttgtttcccaattttttgaccactcgacatttcccactagagggattttcccttgatacccatcttcattaattgtcacttcttttggcactaacgattgatcattagtatggtaggtattactaactgtttttgtaaactctttggtttctgtgcgatagatactatccttatgatgtaccttttcttttggtgttaatttaatacgtgtagcctttagaataccggtttgaccatcttgatcataagcgatgctatcaggataatcaccgtattcttgatttggatagggaacaattttcggattttcccaacgcatatctttctgaatttcaccataatgtatccatcttgtagtttgtttttcagcatgtgcttctttgacaggatattgaaatatgctacttactatgagagaagacaaagcgatttttaatactttatgtttcatgatatctcttcctaacttttaaatttcacttgttaaaataaggagaaaatttatatccgattgcaaattctgtatattgatcggagcattctttataagctgataaatctatttgctcgctaggaggttcgatattaatagtaagtcccctgttttttaaatcttctatatcccatacctccacttcaaaggcaatatccataataggtgtactattattcatttcttgtttttctagcattttcacttgaatactcatagttacatttttatctaattcacccttattaggattaagttcatatattttttcagtgtattggacttgattctcctgataatttttttgagaatctaaaaggaatttttcagcatgataatagattactcggaagatccgcactcctaatgacatgttttcccataataactttgagtgtagtaataattctttatgacttccatgtctagaacggattgcatccaaacatactttatatatttttacttttgatagatttatattttctagcttagattccccaaattctcggaaagttgttccttccatttcgtatatatcaaagaacatagatgcataaaaaataagttcatctaggtttagattcttatcaaacaaactttcaacaaacataagaacaagttctattttctctaaagataaatttgttaaaatatatttctcttcagtgtagtccttgttataaatacgaattcccttatatgtatttccatatagccttttaccttttaagaaattttgtacaataggtaaaaaaggattgtacttctccattgccttatgaaatagatcttctatttctcccaaaaacagagggtgcttatctttcaaataattatataaatccccttctattgttcttacctttgaaatatcctcttcagtgtattccagtacatttctttcctcttcatttaattgtgttttaaaaaacacctgacggataacagaaggggttatatgtgcttcttgctgtaattgaattacaaagttatcgtattcatgaatactcattgtttttgcctgttcaggattttcaaaaaaaacactggtatatttcatttgtttattctcctttattctttaatttccgtactatagaaggatttgtttattctttaatccgattctaaatacattcatattcttaacatcaatatcatgaagtaataaaaaagcttcaaacttttcgttaggaaaagaaacaataatttcaacatcaggcaagtgttttaaagatggtataatctttttaatatctttgactttcatatctttatttacatcacaaaacaattgatacacattaaaattatcattttcatttttgataataatgtaacagtttccatttctataaccttttactaaaatatcagattgaataactttcattttaataccccttagaaatttctatacagcgtatttttttatagcttcttctattgttttagcatctttttcttctgaataatctatataagctggtattaccttaccaatatttaataccattagatcaaacctttgatccgtagtttcgttataaaagcaatgggaataatagatagggatctcatacagcatccaaccctttatatcaaaccctttctcttggatataagtaatacagttatgaaaacgaattaatgaatcatcctcatgattttttttattgaagtaactcccctcttcaatttcttcaaaatgagaaatatattcttctatttttatctttatatagatattcaagctatttttcagtaattcttttgcaatttctatcttttccatataggataccccttatgatttaatagtttccttgctcttgttcaaagtcgaatgctctaccgatagattatggaattgttgaaatactgctttcataacatctatgtcttcttgatccacttccaattcttcatcaggcgatacaatttcaccagtttttaaccagcccttatacattgatacaaacatatcaatcgcttcttttgtattttcttgttttaacgtgtcccataattcttcatcaatttgatttataaaatgatctaaattgattgcttttgtttccctatattgattaacaagcacttcttttagtttttctaattcgatttgtgacaactcattaagatcaaaatgatattttagccaatgatatccttcagggatatattgtacaaattttaaaatatcctcttctttagaaaagtcaaatactatataacctttccctttgcaagtaaaacaatttcctttttcctccgctaaatcttgtaataaaccagctaaacactcttgacattcacagtctattttcatagttttcctcccaactttgatacattaaaattaaaactctcgaatcgagagatttaacaagtaaatctctatcttccaaagttctagcttacttactgatacataaattgaatggctaatacaccgatacgatttatcttatttttatcatcccaataaatatttacatcagcgtacttcccattaaaatctttctttattaatttatcaatttcgctataatcatttgatttcgtttcgtaaattgctgtatatactgtatctactccacatcgtacatcttcaggtattttcttatttgcatcttcccaaagttccaattgatatatttcctgtttaacttcttctactgatttttccttttttgtcatagcttctaattgttgatcaaaatactcttttttcacaccatcataacggttaaacacacctaatttttttcttaaatcgttatttattcccgctttttctggtggggctatataaaatttactttgagtttgctttgtggattcttttgatgctgtattatgatttacaaaccaatacaccgaagcacccattactattaaggccatacatatataaataagtaatttacgtttcatatcctaaccgtccccctattccttattaaagaagcttaatggattaaggacttgtccattcattctagtttcaagatgcaagtgtgcccctgtactatctcctgtcgatcctacatgtccaataatctgaccagctattacttttgcatcttttgatacagtaatagaatttaaatgtgcatatctagtttcaaaaccattcccatgatccaaaataactagatttccatatccacccatagtaccagcaaatgtcacagttccatcttttacagcccccacaggttgattcataatattaggcgctgatatatcgactccgttatgtttttctacctttcctgtgattgggtgaactcgttcaggattaaaattagaagttacattttgagtaaatgacaatggaaatactaaccctttttcatttgcggtaacgttttgtaattgtcctagattttgatttattggattaggagtctttactttatatgtgtaagaagcaacccttctaacaacccgatcctctttacttaaaaaatatttctttgtagtagtttcaattatcgctactagggtagggttttgaaatgtatcttgaaacttcagggtattcgctttatatttcactggaaatttggagttagattgatcaagcacttggaattcaaggattttataatctgtcccttcttggaatccagtgttatcttttaaactttctttaaatgtttgttttgcttttatagggtcaaacactagctttccatttgcaagttcatcttttttcaattctaaacttgcatcatgtacagctacctctagatcctcttttaaatacttagagctttttgcgtatgtggcaatattcatattcaaagttaatcccataacagccattaatacgataaataaagttctgataagatctcccacaatatcactcttccttatgtagtccctgtatattcgcttctaacagttctcttaatcttatagggcttagaattatcaatcttaaatacatcaataactgttaatggaggttgaggaatttcaaactcaatataaattttttcccctctagtggttactgtttcagttcccttaatttttatttgatccgctttataatgatggatatttacaagatagtccttcatttctttatataaagctgaatcatatttcccttgtaaacttgctttcttttgagtctcatatatagctaaattaatagtttcatcgacttgggatgcattgagaaataaagctggttgaaaaattgaccaaaggattaatggcatcaataatacatatgaaagaacttgattcatacgcacacccctttcatattttaattatttactattaaaagattgcttggtaaaagttatttgtatacttttctagtaagttcttatactcttgttcttctttttctgtaacttcaccaccctcaccataaatcttggaatacaacattttctccctcttttcttcctcttcagatgggaaaatgttaccttccgcaagctcaatgaattctattaaattctcaatttctttttcatttaaagattgttctagatcagcgcaaatacagaagtaagctaaattccaatgttctactttcaattgaattccacagatcggcaaataattaaaaatctctagtaaatacattctttcctttgtatttaaattgttttttccttttttaatatgttgtttaaggttacgcactacctttgctttgacaacatatcctgtatcttcatatcctgtagaaagttcttctaaatcagccatcccagactgatttctatattcgattacttgttcagcaattgtcatagggatagctaatgcgcacacattttgtctttccactttaaacatatacatcacaccttcttaactcttattattctcaaaataatgttctcaaaaataatgttctcgataaaatgttctcaaaaataatgctctcgataaaatgataatccattgaatattcaatggattatcataaaagtttgctcaatacttatttttaaatttgtagatattaaggcgctactttagtagaagtaatttgtttctgtacttctccacctttagtttgaactgaaggtgttaattgattccatacaacagcaccaattatcacaagtgttgcggcgattaataatatttttgaaattactgattccattttctttttctcctttatgatttgaatttttattttacttttgttccatcaatttgagttttaatttctgttccttttccttgaactgaaggtgttaattgattccatacaacagcaccaattaccacaagtgttgcggcaattaataatatttttgaaattactgattccatgcacattcaccccctttaaatatgactttttcctaaaatatcattaaacatggcaaagatataaataactaaccatgatatgattaacaaacttgttgtagtaaaaatcccaaacattaacgttttgcgttttccactctgttgcatttgtgcttcatagtaagaaaaagcaaatacgctagattcagcattaattgtttctaatgcttgctcttttgaagtttgatccattttaaaaataatatctcctaacgcttttgttccttccccaccaatatcctcataaaacacatctttagctttttcaggatcagatttccataatgaaagaaatctagcaattgtaccgttaatatgttcaaacattggtagagagtccctaataattccatatatattaacttcttgtgaaggatttaatgaatataaatcagcttttaaaacatcaaacaatgtaaatacttctgttattttcttttgatattttaatgttattaaataattaattatcatcgagataattgagtatttaaaaattggctctgtggctagatatatactccaaaccacaagtaggctcattacagaaaattctcctagcgttacatatggaatagctaggtaatagattgccaagaaaagtaatactaccattcttgtaatttgataatgagaagctttaatatacttaatttctgcggttgataatttttgctggaatttcgatttattattaactaaaatgaactttttcttcttttgttggatactttgagcaatttttgttctttgtaattttcgttcttcaatagaagtacatagagcataagtttgatatgctcctattccaaagaatatgagtaccaatagatagacaaacaaacttaccaataaatctatagacacatcttttacactcccatctatttagcaaatgtatttaatatctaaaattagaattatacaatttaggtattcaagaatactttaaggctgtaatagttcctattttagatatcggctctcggtttactcataacaatggctgtaaggactgaaaagattgacattactaaactaatcgtaaatagtattattggtgttttctgttggaaaacataccaaaaatctactactcctgagatcctatacgctaaaaagatcattaaaggaaataagaccattggtgaatatcctaaaattactgtttctaattttcttgttttatcagtttggatatcttgtttccttttctttatatcagcatttaaatccattaaagacatagtgatatcaccacgatctatatgtgctttctttaataattttgcgaaacgtttcgcaaatgttgaatttattgaatatgaaaatacatttactgccctttcaaattctaaattccctctatccttttgaagtgatgataatagtttcatatagatatgctttaattctttattttttgtttcttttacagcatttagcattgtataatatatatcttttgaggtactttgataattttggaataaaacatgatattcgattaagaatgcatactgtgtttttaatcgtaacattgttaatctatatctaattgcaacatacggtaagattccaaaagtaataccaatacctaaagcaaacactagatcatgaatcaaaaagtataaaactgaaacagttattacgaaaacaagcattgatgcaaacaagaaattaaacacatttatttttttactatttttagagatactcgaaagtagtaattctagatgtttaacaaatgggtgtactccgtcattcctttttgctgtttgatgtacttcttcccatcttttaatttctcgtctatttttccatcttctaaagttcttttctaactcaccttgtaagaagggagcacctaataaagcccataaaccataaaagaatagggagtatccaagaatcttagaaattgcttcaataaacaaaatcatgcttattcactcctaaaatataatctcttcttttatagttgtagttattggtgaacgttcacttctttcttgtaataattggataaatctttcagcctttttccgatctacagatttcattttctttatcagtgcttcggaaacttctgaattgtattcccatctttcatccagttcattatatttcattaaatagttgatccaagctttatcgcctttatagtcgtaacaaatttcataaatactcattaatctcttttcattttttggttcatcatttttcataataatgccaagatctaagttttttgctactcgtctaatttcattttctagctttctatttgcgtatgcatcaacaatatgttgtgctaattgttcaggcgttctagacggatcagtaatatgataggtcatcatcattccagttgtccctctttctgcccccttcatagcaccatcggcttcaattccacgtacctcttggaagattatgtaatcatgatctgttcttaaagccgaataaattacatcttcaatatttccattaatggtatacatgtcatatacgagtcgatcaggaaaatctttttttagaaaactttccggacttgtttcaatacaaattgcaatcttttcaggactcctactagcaaatattgtttttaacatagtagattttcctgattcaacatgtccagctataatcatattaagatacagctgtgatatgatttccattagttctacatcttcagaagaaattgtttttcttctcgcttgttcctcaaaagagaagtttttaattataaatcttcgaaaaacaattacagggaataaatttgctggtggacgaataatgttaacccttgttccatccttcatttcgatttcagcccttggattttcatgattaattttcaatcctttatggcctacttccaatgcacgaaaaatctcatagatatgttcctcgtctcgtaattcttcttcttgctttacaaatttaccatttattttgaaccatatttctttaccgatgatagatgctgatactgattcaggatactttttccacttataaaacgctccgaatccataaatttcatggaatagcgcttgagcaagcgaatcaaagaagtcaggatactttacatctagtagattctgttccctaagacacttttcaatttcttttgttaaaatcttttcggcttcatgatcacctaaaattgcattatgctctatttcttgcctttttatcttttcatcggaactaatacctctgtcttcatatatattttctatactttttttgacgatttctagtacctctgagaattcatgcgtttgttttacacttttggctttttccacagtgtaattaataacgtctgccactccacgttcctgtaaatgggagtttatatcaaataatttcggtgttactgttgacatttattttacctccttcctttttttacaggatgccaaaaaatttccttcttcttggcaattgaagttcatcattaaaaattaaatcaacactggatgcgattgacttagcaacagcattaattgactgtttgtatccgatatcttcataatcataaagtacagttcgttcaatctcagaaagcataccattttcacttttttctattgttgttaataatggaatatcaatatctttatggatatcttttgtagtaggcaaatgcgataagtcttcgaactgattaataatcattaacagatcctctttttcataaccaagtggatataaaatatcacgatgaaattgattaaattttcttattgcctttgtttgttggttcataattaaaaatcgtaaattactctcatttaatgcttgaaccatatttgcattatcaaaatgcgatccagcatcaactaagactacatcaaatgtctgtttagagtgttcaattaaatagttaatttcttctttagtaaataatctttccattttagtatcacgattaccacctaatatatataggttgggattaaccatatggaattgtgacagaaattcctgttcagaactaatggttttagatgctaacttacttttaacctgatccatataatttcctttaaaatttagttgatcagtcccactatcccatgcattcagtaataaaactcctacttttgcatttgtatattggcttaacgcttttcctacgcttaaacaggttgaagtagtacctatgttagaaactgaagagaagaaagttatgatattagttttctgtaccattgctagattaagattttgatcaataaaatcaacaatttgttctactactaatctaggtggaattaaataaatatccttactattacaaattgcttttactgtactttcaagttgaggtttgtattgattctctaacatgtaaaatacctttttattttcaaactctatagtagataattcactataaggtaatacacgatctgaaattaataaatatccatctttactagacttttcaacatcattaatctgttgtaccgaagtaaaaacttttcgttctttaattttattaattagcgcttcatcggaagacattacaaataatttcatatttgcataacccctttcttgttatctcccaaacttatagacaacataaattttgtatccttgacttgtataatcttttaatttattcaacattttttgatcagctataacttcaatattagatactgagcctgtagcattctgctgatcttcttgtgtttccgttacctctttatttccgttatcttttactgaagctactcgaacattctgtaaaatcggtttggctaacctcataacttctacatctgagtcttcatcagtttttaatggctctttatcatttttcccttcatttcccttagaatcttgaacaagggaacgaattacagcttgatctttatcaggcacaagataaaagtctgcaatgtatgtttttcgtaatgatcccggaaccgcaaacaaccaactatcaggaatcggagcaataaattctcccttttcctcatttggaattagattatatgtatccactaatttggaataaatttgagttccttttttaatatcaattgaagcatgtttatttaaaagaagttgtacatcttcaggttttaacgcatcatgtacagctatatcttttcttacagaaactacttttatgtcatctttagtaatttccgatttgaatttgatatcttgctttgcaacaattacatcagttgtattaattttgtctttaaaaactagttcataagatcccactgtaccaattcctaataccatcattgaaacaggtaatagtacctttaatttccttttcaacttcatttcttcttccccttcttaaaatattttaggtatgaatctagaccttttcttcacaccattattaggtaattcataaaattgacgaggtaatatttgtactagaacgggttttagcactttttcgattttcattttatattgctcattatcatataagaattcagatttccacgttaactctattaaatcctcataaggaattgtcggaaaaagaactaacggtttcttatctccaagagattcaagccatgtagtagtatcaatcttttttgtatatttcatatttataaattgataagttactccctctgtttcctcaatctcatttaggaaatcaatagcccttttttcttccctttgtacctcagcatcaattccaccgttcttaatggttgatagccaatctattttgattggatcaggctctatgcaaatataaatatgatcagcatggtgtaataaactttgtactgttggatcattcaaacgattcgaaacatctacaatagtaattgtcgagttaatcgaataaacaaatttcagcatttcttcgtatccaaatgactctataggctctaaacgtgaatctattacataccaatccacaccatgttcattccatacagctccatgctttttaaatgatctattcataagaagttctcttgctacatctacatattcctgttccttttcttgttctttaacaggaatagccaagtaatcaaaggtgtaaggttttagaactggatactcaacataagatacttttaatcctcgtccagctattgctttagctaaattatgtgcaaatgttgtagaaccagccccagaccacatagagcctactacaattagttgattaggaatagatgtataagatgttttaaatacttctttttctacaaccttttcttgataaattatcttttcctttttttcaacaggtggtttagtagctattacacttgcattcacttctttgatttgtaaaggatcttcttcactgggttgtagggaaaagaagtttaatatttgttcaataactagttcaaaatcggattcaaaaacagtaaattcaatgtcatttctgtttaaaaaatcacatatagattttgaatcaatcacttttgaatctacaacaatataatctaccttccaaaattcaactacatcctctacatcagttaccgtctgtacattcttttgatatatttcaacctcctttccatattcatgattctctaaaattgcgactaatctctcaaaagcaaaattggacttcatcgagatcgctaatttcataattccacctactcttttgtgtattttattcacaaaatttataacaaaagtcctttctaaaaaaaggactatgtttatttaatcaacgttctttcatcacaagaaaattgtaccatcttgtgtttaattaaacaacaatttttgtgtattttttaaacaaaaatgtttaaatatccgaattagagcatattttaatattagaaaagcttactattacgatagtaagcctttccattaatcttatgataattctcataaactactttattatctctctaattctagctcttcctctttttctttttccttcggcttatcttccagcccttttaaagaattgaattcattttgagcttgtttttcgctagagtaaaattctgtaactctttcaacgccattatatttgtctaacttccctacataccaaccgtccttagaatttattacttttaaatcctcgcttttttctttttcggcaacataaacattattagtaatttcttctcttaatccattatttcttggtagatttttagttttattaaatgcataatcaactaattcatccatagtttgaatttctttattttttaataatgtccagcctattacattcccactattttctgaaaggagtatttctttttggctaccataggataaatattgtcctacatgaaaattggtatctattttaatatcatttagccttttatctatatcatttctaatatcttgaactttttcttcaagattttcatttaattgttctttcatgtattgctttaaaacggtttctttgtgtaaagattgagagattgctattctcaacaattgattttgtgcatcttttctatttgtatattccttagatacaatgtctgttccacccatacttgcaacagcatacttaccctcagatatcttgtgtacttccagcaaggattcaacatgcttaaattgagatgcttctactagtttattattagtaatttctttatttaataaatggtaatctccttgtttatgaacttcagataatggaataatcatatttttattggttctcaaatagaatttatcatttttaggtgaatgctctaatctagctgatagaataatattgttttgtttgttaagtaattcaaattgattagtatttaggttttctttattacttagttttaatcctaaatctttttcaaagaactctacagcttcataatattgtttatcgttattttgatagaaatctagaattttgtctttttgtagttcatcaagagtagaaattatatctcttgaaacctcctgaatctcacgaattgcatttttagctaagtttagatctttcgcccatgtagctatatatcctaaagaaaaatcatccctttctagtccataattactagaaactacataagcaacactttccgcttgcgcttccttatgtcctctcggaaggtctttcatttcactttctttatgatgtaacttcgcatgtgcatattcatgtagtaaagtagcaaatttgtcatttgtatttttattttcgtttgtacttattacaatttcatttgtgttcctgttataatatcccccaactccttgatcagtaacactctccttaatatcatatggcgttgtttccttcacatgtttaaagaaatctttatataaattatccattgattggttatctgacaaactatttttaataaaatcacgcactttaggaatttctttacctacagtttgggaaacatcaaacacgcttaccattttataaccaacggttctttctacagtttcagtttgaactttaccattcttatctagcataggttcttttgtcacaggatctactttttcaacttttattttttgcttttgtggagcaaggatacggatacttttctcatattgtttcggacttctcccaatcttcttccaatcattaaagccttgcaccatagtagcatgtggcttttgagcaataattaatattgtattattagttgaataacctttaaattgcgacattacttttagtaaatgctgaaaacgatcatttttaaaaatttcttcaaggcctttttctaattttttattggtatcttcaactgttataaagttttgcatccttctcacactcttttcacatatactggtttaaagaattctttatcaaatttattaatgcttacataaccatcaagcacataatcattaatatcctcattcaaatgaattatttcttcataatcaaaatgttgttccccttgtttctcataaattgatttatctgtccctaaaatctcatgtttttctaacatctttagtcctcctatttacattgaaattcaaataaaactttcccatcattaaaaacaagtacactagcaaattcttttttgcctttaaaaccttttatcttactagttttccctttttcacataaggattttatctgtgtctttgtaagtttctttcctgatttctctttaggaaatgtttgcttacaaccttctttataattggtacaaccataaaatttttctttttctacaatgtgtccctttttacaagtaggacaaagggctaaataatcctgagaagctatttgttctacctgttccgacatatccatttcctctagttgttctttcgtggttgtaactaaatgttgtacaaaccgttctgtattggcaataaagttttcttttgtgccttcattttttcctattctctttaaatatttttcccaacccgctgttaattttggattagctaacattgtcccttccactaaatcacataaaatcgctccttttttagtaacatacgtccggttatttttaatttctatatactcttgtttttttaaattttcaatgatattaccccttgtactttcttgacctaatccttctgtctctttcaaagcatttttttcttcttgatctaatttgtctaacactttacttccaccacaggttttcatgagtataataagctcaccttcagtgtatcttttaggaacttttgtcttcccttcttttgttttcaaaacaaccgcacaattatcaccacgattaagtttgggtaaacttcctctttcatcctcttctttactatcttcatgatctgtagtgaataagactttccatcccttactcacttccaccttccctactttttcaaactttaaattttgaaggttcaaatcaattttcgtttcctcataaatataaggatgatggaacattcctagtacgctatgaacaatttcaaaatagatatttttttgcttgtccgttaattgacttatttgtttttctgttgggattttttcagtcagtacaatagcataatgctcctgtacttttttattatttacatatctagaattgggttctaatgaatatggttcaaaatctacaccagcaattttttgatattcttttaaatgttctttcaaatactcaaactcgttttctgtaatatatggcgtatctgttcttggatacgtaactagggttaacggtttatcatacaacgattgaaccgtttctaaaacttccttagggctatatttgtattttttatttattagagcctgtaagctcgataaagaatgtaatttcggtgaagatacctttttcacttccgttttcacttcttctacaatcgctgtatttttcgaatgcaaagatatgttatgctcttttagtttttcttttaacaggtactcagaatcaaatttttctttgtatttggcacaaaaactttgattatctttttcaaaacacccctctatttcatagaaagaagtcggtttaaaattggtaatttccttttcacgctcataaattaaatttaacgttggtgtttgaacccttccaactgtaaacgtgcctttaatcccttttttttgaagcaatccactatataaacgtgtgccatttagtccgactaaccaatctgaaacttgtctcgcctgcgcttcatggtaatagctcacaaattgattagcatcttttaaattttcgaatccttttctaacttctttttcaactaaactattaatccataatcttcttaaaggcttctctccgcctcctgccaagcgaattatactataagcaatgttttccccttctcgatccgaatcggtcgctataaccacatctgaagcgtctttcattagttttttaatagtattgaactgttctaccttattatttgataccttaaacttaaattctgaaggaataattggaagatcttttaaattccaatattttaatttttcatcgtaatctacaggatcataaagtgttactaaatgaccgatagcccacgttaaaattgctgaattcggaaacaaaggacaagctggaatttctatatatcctttctttcttttggtattcatgaatacttcctcgtaggcttcagcctgattttgcttctccgctaagattaaagtatatcccatttataattcattctcctttatcctaaattctatatgatataagtcttgttagactgttcataacatcaaaatccaaaatttaaagcttactttcaattttataagacgagtatgcacaattttgcaaactattatccatctcaaataaatgtccgtatttttcgataatcgagaagaattcttttttactgataggttgaggttctacaaatacttctcccacatcttttgtataatcaacaacttcataattgtcgccaatggcatcatgagggtagaaactaaactcttttgttttaggatcatacgctaccctcaacaattcagataaatacttttcttccccatcaactaaaatcatatgttcagggcaagagatatccccatcaaataccttcccaaaacgaatccatattgaaacagatgaaataatctctcctgtttcttccaaaataattctgtcttttgctaacaagactttatcgtactctaattgatatttcattttcatcttcctttcttatttgaacattttttcaaagcatcagttttgtttataattttacataaacaacaaaaccaataattagccaaaatggaataactaaaatcaatgcatttatacaaccttcaataaaagcaaatggtttctcttcaatctttataacttgttccactactatttccccctcataaaatcatctttcccctcacttcatacccctattaaaataattaaggcaattagggtatttaagatatttttaaaagctatttcttattggactaaaaagtttaactcttcatcaatatctttttcaatgtcttttatgtcctgtgaaagtaacttttcaatatcatcaatattgttagccaattcaacgttcttggctatttcagttttattgtcctccatactttgcataccctgtttaatttttataacggattcgatgctttcacttgaaaaatcagcattttccataattgtttcaagttctacactataatctacatattcccgttcttcttcaaaaagtgtcatattaatagactcaatcttttctctcggtagatattcgtttaatgtaaatttaccatccaagtaatctctagccaatttttctatcgactgaggtgtatttatatcatcattcaaattatcagcttcattttcctcatgaatattcaactcaacttcttcttttttatccatttgcggttcaggttcttgaacgatcttctctttttgtaaattaactttcacatctttttctaactcattatcagttagttcctcaactttcttatcattatgattaaatagcgaacgatatctttctctatattcatcataatttttcaagaaatctttatagataacaaattgccatgcctttttcaatttcaaagggtaatatccagaaataaacacataacaatcttgcttatctatgtttattaattctccttcagtaattaaaggtcgttttacatattgctcttgtactgacttagaacttgaagacttcccactaaacatccctgacggactacttaatgattcggatgtcatacgaactgtagtctcaccagctaaattagagtaatattttgctgtctcaggatctttggttcttaggaatagcgtaaagtcatggttattaataatagttcgtgctacttcctttccatataaattttctaattgtgcattatcttgaataattgtaatcatactcatgcctaacccacgacaagtagataaaaccctaccatacttctctatctttccaatattcgcaaattcatctaacaaaaagatggatggaataggtagtttagaatcattacgatcagcaatatcataaaatacagttatcaattgatcgaaaaaagttgctgttaatggcgtgaacggattttcatccatacgaatttttatatacaatatacttttctctttttgaaattccctaaaattaaaatcactatgcgtagtcattcttgcaactttttgtagtgaaaatatacctgtttgttgcgcaaaagaagacaatatacttgtccttgttttaccttcagcaatgctggcatctttcaacaaattgtatgctgggtgatcttctccaattgcgtcacacaattctctcaaataattttcatcatctgatacacgataaaattccctcttaacatcttttggtaaattcgcattaggattttcactcttacaatagataattaatccagctagtaaatctttggccgtattaaagaaataatcctctttatcatctttcttagagttttttgatattgttttagctaattgtaatgcctcttgatcgtctttcacgtaatccagcggattatacgcattagactcaaaatttataaaatcaatttgatatactttataaccttgatcttcttttattttatgagttaaattatacaactcacctttaggatctgtacaaataatggttctctctctattgtttattaaattatttatcgcaaaagcttgacctttccctgatcctgaagatcccacgacatttacattttgattatctaccgtagtttcatcatgaacaatgattaacttctttgttttaatatctctacctagaattatcccattttcagcctttaaagttttaaaagggtctttttcggagtatttactgtctttagcaattgctcctcctttaagtaactctagaattgttccccatcttgaagtaccatgaaccccgaaatcactagcatcctcatattccttatttttcaatcccattttagaaatcacaaagcccattgatataactaatactacaagatataaaatttgcatttgcttatcagttgttttcatgaactgaattgtgccctcataatcctttaaattatcctgaagattattgtgttccttcagcactctaagtaatccagcatagaaatatccaagtataccgcctatagttaaaccacataaaatttgaacaaatttatttcttccttttcctttcatcttcactctcctataattcatgacctccaagataattttttctagcttttttcttcatttttcgttttctttctaaatcattatctttggtttcttgactttgagccatttgaattagagtgttaaataattgccctgaatcacttgcgacattattattcgtttgttcttcaaattcatgttttcctcttggctcaaatccttttctatctgaaggtctgtaatgattttgttcataagacttatcattatatttcttttgctttagtagtaataaatcttcagataatatacctgtactttctcctgttaaatgtagaagtagtaattggctttgaacctttggagggattaccttaattgttacatcatcaatatttggatagtaaattttcatcatattaaatagtttttcttttaaggcttcttttctactttccttatcagcaatttgttcactaattgctgtaaatttaattgatgaatcatatactttttccgcattaaaattatcaaatgtgtgtttataatccttctgaattttagtcttagttctttctaaaattagcaagtccttatttacactatcccattcattcaatacatcttttaaattatgatgttcatcattcaaataaggattatccctattaaaatcaggaagcgattcatggattatagtattctctctaaattgttgcgtgtatgaaaacttaatatcataaagatccacattagatccatcgaattcttgtgcatactcaggatataaaaacttaaattcctctttagtaaattccttttgaagttcataggctcttaaagattcatcatatatcgtttcaaaataagaaattgttcgatttaattcatcttttttactatctaactcattagttctttccaataataaatcttcaaatttatttggaatgaatccataagctagaacacttttaggattcttttcaaaggataatttggcttttgataaaaccttttcttcagcatcaatttgtagttttttataatcaatttttttcttccaattatctaatttttttagattctcttttgcactctgataatcaaggaaaccaccgacacgtccagctacttttttaagtacttcccaatcaaactctgataaatccattgatctacgaatctgattaaattcatttaacttttcattctcaaatttttgacgataatcagataacgaaactactttttgttcaataatttctatctttttattggcaacttcaatctctttatttatctgagcataatgtgaagatggctgatattctttaccttctttttttgaaatttccttttgcctttcctcaaattgatattcttctcttgtaagtctcaatcgagggattttatttaggccttgcttttcataactttcatgagaaatccgttcaggaatattcatttttttataccattcattcactttttcagcataagattcacgccattttaacaatgtttctttatcattccaattaacagaatgtatccattttccatcttcattttttattctttttttcccccaactcccatcttcgttgaaaggtctaactgtcaacataatgtgcgcatgtggattatgttcacgatctctatgtatagatatatcagctaccattccatcacttactaacatcccattaacatattcttttagcatttctttttgttgttcattagtaagttcaacaggtagtgcaactaaaagttctcgtgataatctactattccagttcctctcaaccttttcaacttcattccataacttttcacgatcataagcccattttggagcatgtttaggagcaagaataaaagaatcgggttttacttctctacctctataagacttaaattccatatctctctcagaatataacttctcaccactacgatatgaagccgaagcaacagcggattgactagacttattaatattcctcacattgaaataaaacagactcattttgattcttcctcctttcatttcccccgtagggctattgtcgccagacaacgtttgaatcataactttggaaaagttttgattacccatgaaacagttaggaaactgactgtgtaaatgggcactcgtttctcttcgtgatcattataccacttcgtttttcccccaacaagtttcatagtggtcttatatttagatttctcttttattctctatttcttttctatataattcaaataggaggtgtaatcatggtaaagttacgtacagacgagaaactaaatgatattgaagaacaaataaaaaaactccaacaaaaaaagaaaaacctagaaaaacaaaagaatacaaacgttggaaaacacttatttgagtcttgggaaatagaagacgaacaaacagcaatcactttgatcaatatacttaaagaacaagcaaaagaaaaattaagaaatatttcactaaacggtgaaggttctaatggaaactaaggatgatcaattaaagaaaattgatcagaaaattaaagatttaaaaaagttacatcatgatacaaaaaaatctattgagagaaaaaaatcacaaaacctcagaaaagagagagctagacgtttaattgagacaggcgctttagctgaaaaatattttgaaattaccaatcttgatatttctgagcgtgaagatcttttcaaaatcttttctagtttcataaaagctaataaaccgaatcattttaaaaaataaagacacctctttttaaaagaggtgtctttatcaataccacaaagtattcatgaatactttgtggtattaaagaaaaatatttctaattttatcagagttctaattcattttcttcttctctttctttctcattttctttattattttcttcttttgattcatatggtttttcatatttttttccccaattcgtttcacctgtttccgcaaattctaggaatttattgtccatattcttggtacttgcgttcatgtgacggaattgcggattttcttcttctaattcattctgatttttacttcctttgctcaatgtataaacttctttgataccttctaaatttttcatgttatttttttcatggtctttaaaagattcagggataagtctatatttatcttgattaaataaagttttgattcctccatcaatttcttttccatttgagtcttttagactaaatacttttttatcattgtcatactcactattagataaatcaatttttaatttttcttttttatttgtttccacattaaaaacaacaatattcatttctttatctttttcaggattccatcctaaagcaaccattttaggtagcatttctttttgtgaagcctgaatttttttatcgaatgaattgtatttttcaaattcactccaatattcattttctttcttctctaaatatacatatgggcttccatgtttctgataaaactgagaatcttctttgtagatctttaacatttcatctgaaattgaattttgtttcttctcttcttttacctcttcaatttcatcaactttaatatcttttccttttcgctttaaatcttccatttctttctgttgttctattagatctttctcaattttatttactgattctaatgttttatttgttttttcatgattcatattcatttcttttcttaatttttgtatttcctcaataacttcgttattagtttctttaaattcttcagattgcatttttatattctcatctaaatattttaaaattacttgttttgctatttcaggatttttttctaaatactcatatactttttttgttttaccattcaattcttctttattaatactttccaatgcttttttatcaatatctttttctttttcttttccttctttatctttatctttatctttatcgttatctttctcttctttcccttccggatcacgttttatttttgataactctcttttcttaaaaatcgctttccatattctactcattagttcatacattgcttcactaaaatcatctcttgtttgttcagcattattcatagcttatttcctcctttttctatacaattatcaattaatttgatatacatttatagtataataaaaaaaaattaaaaacatataaaagcaaaataaatttaatataatatttttaaaaggtggctgaatttttttgaaacaaaatttagatattccattgcaaagaaccgacaaaaataaaattatggaaattaaaaaatcatccaaaagaagttatcttgaacaactacaaggaatttttaattactatgaaaaaatttctgtagaattatttgccgataaagttataaataattacgatcaacttaatgatttaaagaaagatttagttacaataacaattaaaaatgaattattcacacaagaagagtattttagaaagattcacaaagcaattcttactaaattacctcaactagagtttaaagaaatgctaataatcatgattgctcaatacatgaaagataaagaagatccagcttcactattttaaaaacaccattttaaataggctgataagcctattacacttcttttaaaccctcgtgaaaaaagagaagcatctacatatagtagatacttctcttttttcacgccttttaaaggctctcacaagacaattactccatttaaatacttaccccttaccaaaatatccaactcacgcccacgcctcttttaaccccttaaaacaaaaatacaattctcccttagataaatgtgctccaagtcaaaaaagacaacacctcaaaaacaaaacaaattctttttgaattcattaatggaatctttattacaaaaaataaataaacctaaaatgaactttatataaatccataataaattctaaataaatttattatgagtttctttttgattctctttctgaataaaataattgaaattcaaaagtatatctaaaaagaattcattttaaatcttttttacaccttatttctaaaaaggtctaccgcccacaaaaagaattcaaaatgaattcaaaaaagagttgttttatattttattttgttgtataattaactcaaggatgatttaaacaaccaaataaactatgaggtgaataacatgtcaaatgctaatgaaacacaagaattagaaacacgaactaagaattacgaaatggattcctctttcgatattggaaatgcaagcatcaaagctaagatcaatggagaaaaattaaaacaaccttctgtaattcaatatttattagagcaaccgcctgttactgaaacaaacttaacaaaacttgtcgctaatttagatgatgatttaacagtacatataactagtaatggcattaagcgtaatggcttatataacattggaaaaagtgcaactctaacttctgattcaaacgttgaaaatatgaatataagattagggaaaaaacacaaacatacaatccctgttgctatgacattgggtatgatggcttgtgaagctgtcaaaaacgcatttacagaagacggagttctcccttctacaattaatatcaaatctaatttaagttcagcaattcctatgagtgaatatacagttgataaagctgagtttttagagagacgattcgctgaaaatacacatgtagttgtagtttacgtaggtaagcttactgttactgtttttattacattcgaaagtgtaaaagtgactaaagaaggtgtaccatcactttatgctttaattgaagcggattccgatattctcaataaatacaatgaacaataccaagaaaacgccaaacctaaagattttgtaaacaaaaaaatcttgcacgctgatattggtgacggtacaacagaatatgtttacacacaaggcttaaatcctattccaaaaaactgtacaggtgaacgtcgtggggttggacatgctactgaagatgctatcaagctattaaaagaagatacaaacggacgtgttcttttaaatcgccaacaatacatgaatatcctaaatgatcctactcaccgtttgtatcaagatgcatctagatttttagaaaacagcaaatacattcaagctaaaaaaatactagaagatattgaagaaaagtacacagaaaaaatagccggtgatgccgatttcatttgtgtatacggtggtggaagtatagaatttgaagctttactttatgaagatttactagagttttgtgaagaggtaaattgtaagttattatggattccaaaagaatatgctgttgatatgaacatggaagggctatccatattaaacaaaaaaatcttttttaaaaaggggtgaataaacagtgtcaagagccaacgttagttggaagataaaagatattaaagatgaagaagcaagaaacaaaataaataagtggtgtgatcagcaagagaaaatacaagtttcattaacgagcttagtacttcatatgatagaccgtttcggctataaaaatattaccgatcacgatattcaaaaattactacatcaagagtttcctctcacaagtattacaaaagaggtaagcatttctgaacctatagaaaaaatagaggaaacacctgataatatatctaagcaaacaaataatataactacttcccctaaaaccattgaggaagcaaaaaagaaccctgtccctaaagaggtacagagttctagtgaagatgatttatatgctcaggttgataagaacgctttttaaaagcgttcttatcaaccaccaatacccttttaggcttttttcaccactatcagtaaaaaaacaatcccatatttcaacaaaatatgatatactcgttagcaaagatatgatttctaatttgtatctttgctattttttgtaaaaaaacaacatataaagatgtaaaaaatataaaaaaatataaaaaaagaaggagcaccgacaaccgccaagtaatcgaactcctctctaattcctattattattaatttaattataatcttctacattttgtttgtcaatgttatattggcttatataaagatgcaataagattgtaattttccccaattagagagttcgatgttaaaagtgcccttctatgtaaataggaggttttttatatgtctgaaacacaactagtaggccaaacgcctacctttattactcagggacatgtcccaaaagaagaattaagactaccaaaccaacattttataaccgcaatggattggatagataaattaggagaatccgcttactgtgattatttaaaaatgtatacaatggctgatcgtagagataaagatagagaatatgatagagttccaagagcgctttctagtttatgggaagctttagaccgtaaagaaaagtattttcgtcaaaagatacttattccattatgggaatatggcttagttgatttagtagaatatcaaggagaacatgcaagagctggacataagcctatgaatatagttatttatcgttacccttgtaatgacattactcttttaacaaagcctttagaaaaagtacgtgactggaaaaaagactataaatcatcaggaaagttctatgctataaagggtggaagacctaaaaacgaactaaaggattctccacagaatcctttagtaaaggattctctacagaaacctttaaaggattctccacagaatcctattaataatactaaagaacttaataatttattaaattattttagtaagtatgtaagtatagatctatctcctatcgacttttttaaatttgctattgtaagttcaccatcaaaatatgtagagattgaattaaataatttaactactacatatggaaaagatatagtgaatgaagcaattaaaagaatcagtgacatgaagactgataaatacatagctactataaaaggtattatcaagaaatgggtatcgcaaggaatgaaatctttttctgatattgaaaatgttgagcaagcgtatcttgaagaaagaaaacaattacagaaaccaaagtctcaacaaaaaccaaactctcttaaaccatcatacggaaagaaagatattgttcctgagtggcttaaagaacaaaaacttaaagatgaagaagtacaaactaataaagagttgcatcaaaacagtgagagcatacaagtgactactgaaactattaaagaaaagattcgtttttatgaaaaaaagctaaataaatatattacagaagacattacagaagacaattggaaagtagctaagatctacttagatgcaaaatgggattggacagaaataggcatattatttaaagaaattgatgaaatgaagaatgcgattcaataaaataaagtgttaaattcaaaatgaattcctttggattgttaatttaaattcagttagaattcattttggatttcttttaaacctcttgtcattttaaatagaaatatagtgtatagaaaaatgcttttcccttactattttgtggaagcattgggtgggggttcggtgggctaagcccccgagaacttccgtattttattatcgaataaaatattatttatgaacgttaaactagcgattcgacagggtatactagttaatccaagctgtgatgatcatcaccccctattttgttatcagcttggtgatagctgataacccagtcgaaaaaaatttgtaaagagtaaggtgtggagattttttgaatggtttctcaaaaaatactacccgttctttacaagatttttagctttatatgttaagagggattttttgagtaggatctacataaaaggatttctccagtggcgtgtcaagggaatagcacaaatgtttttagagttgatgttgagttgggattttacaagttccacaatttgctataatgctaatgcgaattgtggaacgccataaaagcataaacgaaacacagcgattaaaaatattttgcccctttacacgccacttcttcgggggtatatagcccttctttggaataagaaaggtatacaacaggcatagaagattttgaactcaatctatgccttgtgtatattaaatataggtagttagtttattagtttcgttgttttatctttaaattcttgttcatagacaacaatattgtatttatcacaatttttatcattccatgaattgaaataataactatcatttgtttccataatgtctagagtatcatgttgccctttaaagtcttctagagtaaggctattatcttctagatatgtttttgcttctcttttagcaaatattatcgcattattgatatctttgaataaatagactttgcttcctgttccgtcattataaaaatcatattctactagaactactattgggatacacatataaaattcctccatgataataattttttataaattatctattgtgggtcataaggtttgagaattttgtttttagatatattaataatttattaattaatgagttactgtaagtttggttattaatctttttagctattgttctatctattgaaatatctgatgctatttcatcaatacatctactaaaagcatttagattaataattgtattatgaaaagtatcatctacctcacattcataactaagttccagtaaaattgtttgaaatttatgcaataattcttcttgtccttgtttcatgttaactactccctcgtatagtatgtttaaacttaatttttttactttcatgagagacctgtaaaataactcttggacgtctcaagatacacgagaagactccttggaagaataaagtattgttgtccttattcccccttttcggggggatgggcaaaaacaccctactcctaaattccaatcacttacaaaaatcctggataataaaaaatggacaaagctacgaaagttagcacaagagaaagaggtaacgccttccgctctactttgtacaatatatggtgatgtgttggcatattggagtaatcaacgtcgattagcaattaacttgactgtatttaaccgttatcctgttcatgatgaagtagaacagattgttggagatttcacatcacttattttattggatgttgatgtaaaaccagagcaaactttctttactagagtaaaagaaacgcaagctactttattagatggccttgaacatcgtcattacgatggagttaactttattcgagattttactcgatatcatcagatgacgccaaaagcagttatgccaatcgttttcacctcgatgttagcaggtgcaggtgctttctcttgggaacaacttggttctcttcgctatattcatgctcggactccacaagtgtatttggataatgtagtaattgaaaaaaatggagagttattaattagctggaactatgttgaagagttgtttgatgttgatgtaatagaagcaatgttttcccaatttgttgacttattggaacaattggtgaaacaaagcgatataacatctttgcatatgaaagaatcggatcaaactctaattaagcaatacaatgaaacaacagaaaaaataccttcaactactctgtatcaattatttacagaccaagtaaaacgtacgccggatgaagtagcagtggtatttgaacaagaatggttaacatactcggaacttcataaacgttctaatcaaattgcccacttcttaaaagagcaaggtattggtctaggtgacaaagtgggtcttttagcaaaaaggcgagttgacacaattgttaatatgttaggtattttaaaatcaggtgccgcttatgttccgattgatcccgatcatcctttagatcgccaaacatatattttaaaaaatagctcatgcaagcttttattagaacctagtctttatgaagaaaatcatttgtcattttatacaacagaagatatgcccgctattgctggtccagaagatattgcctatattatatacacttcaggaagtacaggaaaaccaaaaggagtaattattacttaccaagcggttacaaatactattcaagacataaatcaaaaatatgaggtgaatgaagatgatcgtattattggtatctcttccatgtgttttgacctatctgtatacgatattttcggagctttaagcacaggtgcaatgttagtaatgattcgtgatccgagagacatgcaagaattaatccgcactgtcgaacgtagagggattacaatttggaatacagtgcctgcaatcatggatttggcattggagcaagtaggttctcattttgaatatccttctttacgtttagttttacatagtggagattggattccgctttctttaccagaaaaaataaaacgacattttccgattgcagaagtagtctcactaggaggggcaacagaagcatcgatttggtcaatttattatccgatcaaacaggtggcatcacattggaatagtattccatacgggatgcccttggcaaaccaaacgtattatgtgttgaactatgaaaagaaaatgtgccctgttggtgtaattggagatttatatatcgggggagtgggccttgctaaaggatatgtaaatgataaaaagaaaacaaatgaagcgtttgtgtcacatcctgattttggtcttatatataaaacaggagattgtggaaaaatgcattctgagggatatattgaatttttaggccgccaagattaccaagtgaaaattcagggatatcgagtagagttagaagaaatctctcattgtcttctaacttataaacaagtcgaacatgctgtcgtaattgatcaaacagatgagaacggaataaaatttttagttgcatatgtggtaactgagcaaaatattagtacaacagaactacgaaagcatttgcgagatcacttgccagattatatgattccttcttattttgtttatttggaccaattacccctgactccaaacgggaaattagatagaaaagcgctccctactccggagaaacaaaaaaataaagtatttattgccccaaaaactgaaatggaaaaaatattaactagtatttggcaagaagtactcaaaatagatcaagttggagtaaatgatcatttcttcgccttaggtggagattcgataaaagcgattcaagtgtccgtcagactgtatcgacaaggattcgagcttgaaccaaaaaatatattttcatttcctatattaagggacatggttcaatttgttaaaaagctagaccagttttcaagttcacaaacaaatgatgtaaacataatgaacgataataaagctacattactaaatgttaaagataaacaacttaatcaacatacacttaacaaaatacaagaaaaaatgccggatataaaaatagaacgtatttacccgttagcacctttccaggaagttatttatgagcatgctacgaatgaacctgatacaaatgcatattttgaacaaacaatttgggcacttgagggggagctggatattaaactctttattcagtgtttccaacaattagttgatcgtcatgattctttaagaacaataattgtgcaagatgaacaagcaaaaccttggcaagctgttctatatgatgttcaaataaattcagaaataaaaaacttgattgagatgacgaaacaagaacagcaagaattcctaaaacagtggatgaatgaaaatttaagtcgaggatttaaaaatgatgaacttatgacacgtctctgtatattccaactaggtaataacgagcataaagtaatttggagttcccatcatctattatgtgatggttggagcgtcagcattttgatagacgaattattccagctctacgaaactacaaatgccggaactacggcggggttacccatggtaaaaccttttgaaacatttatagattggactttggcacaagatcatgagaaagcacgtcatttttggcgagattatttatcaggatacaatcagaaaattagtattcctaaaaagaaagtcccatctaaaagtgaagggttaaacttcacttttatggatttaacattagacaaggatttgactgatcagttacagacatttgtaactaaaaataatataactatgaatacggcattactagctgtatggggaatattgcttggcaaattcaacggaacgagagaagtagtattgcctaatctagtatcagtcagacctcccgaagtagaaggaattgaaaatatgttcggtctgttcacaaatgttttgcctatccgattagcatggacagaaacgcaatcttttgtggacttcctgcaaaaggtacaactagagacattgaaatgtaatgagtatgcatactattcatttgttgatatacaaaagcaaagtgaattaaaaactgagttgactgaccatctttgggtttttgaaaactatccaactaatccagcaatcttttcttcaaatgaaaacagacattttgctatcacggattacgaagttgttgatgagccacatgtaaagtatggaattatgtgcttccctgaagaaagacttacaataaagtttggatatgatcaaacggtatatgaagcagagaaaatacaggaaatattaaatcacatccatgggttaatcaacacgattcttcaaaatccaatacaaacaatttgtgattacaaattataaaaaatgaaaaggcgagcaagaactcgcctttttaaatagaataggagtaaatcaaatgacaaaaaaattacagttatcagccgaagaaatgcgtcagttaggatatcaagcggttgacttgattgttgatcatatgaatcatttaaaaagtaaaccagtttcagaaacgattgatagtaatatttttagagacaagctaattgaaacgattccggaaaacggatctaatccaaaagaattacttcattttcttaataacaatgtgtttaatcaaattactcatgtggatcatcctcattttatggcttttgtgccaggtcctaataattatgttggtgtattagcagattttttagcaagtgggtttaatgtatttcctacagcttggatagtaggtgcaggtgccgaacaaattgaattaacgacaattaactggttaaaatcaatgctaggattccctgattcagctgaaggactatttgtcagtggtggttccatggctaatttgactgcacttactgtagcgagacaggtcaagctgaataatgacatagaaaatgcgattgtttatttttctaaccaaactcatttttctgtagatcgagcacttaaagtattaggttttaaacagcatcaaatttgccgaattgagacagatgaagacttaaaaatttcagttagtactttaagaaaacaaataaaagaagatcgattaaaagggaaaaaaccattctgtgttattgctaatgcagggacaacgaattgcggagcggtggactccctcgatgaattggctgatgtatgtggtgatgaagatatatggctacacgtggatggggcttatggggctgcagcaattctcagtgaaaaaggaagggagttattaagtggaattcatcgtgccgattctttaacgttagacccgcataaatggctttttcagccttatgatgttggttgtgtacttattcgaaatagccaatatttaagtgaaacattccgtatgatcccagagtatattaaggatacagaaactaatatagaagaaaaagtgaattttggggagcgtggaattgaactttctcgtagatttagagcattaaaggtatggctttcttttaaagcattcggagttacagcttttcgtgaggcaattgatcatggcattatgctagctgaacaagttgaagagtttttaaggaaagaaaaagattgggaagtagtaacacctgcccaattaggaattgttacttttcgttatattccatgtgagctaacatctacagatacaattcatgaaataaacaaaaaattggtggaagaaattaatcaaagaggatttgctatgctaagtacgactaaattaaaagaaaaagtagtaattcgactttgctctattaacccaagaacaacaaaagaagaaatacttcaaatcatgatgaacataaaagcattagcagaggaaataaacacatcgcctaaacatcttatatctgtttctcaaccttgatatattaggcggattttacatattaatagccgattcttatttagaatcggctattatatttaaatgataaatacatatatactatttataagtgtttctcttgtaatgggattaagcctcaaccttggatactcgtttgaaaccagtctttattgcttgtactatttcgttcacagcataaatagatacatcggcatttggatttaacccttcaaaccagtgataggcatttggatataaatgaaactccacatcaacaccagcttgtgctagtttgcttacataggttaatgtttcgctgcggaatggatctaattgaccaacaaatgtgtaagtatacggtaagtcactataatcctcagctcgagaaggtgctgcataggcagggatttgatccgttccatacatttctcctaaatacattttccagccagcttcatttgccttttggttccaaacaaatccctctttaatttcattcgctgaaggtgtatcatttctgtcatcaatcattggatatagtggcatttgtaaacaaattgaaggatattttcgatctcgtgctaataatgataatgctgctgttagtccaccgccagcgcttactcctgcaaccccaattcgattcgaatcaatgtttaatgactttgcattatcagcaatccattttaaagctgaataacaatcctcaattggtgctgggtaagggtgttcaggtgctaagcggtagtctacagacacgaccacacagctagcttcttttgcaaacctcatacaagtatcatcgttatcatctatagaccctaagatataacctccaccatgtatccataataagacaggtaaagattcatgatttgattttggacgataaattcgtaatggtaacggattatcatcaggcccaacaatgactttatctgttaaagaaagagagtcatcaacaacggtaggtggtctcatttgagctattccttctctgattgattgcaaattttctgggcgtaaatcgagatccggaaacatctctaatccttgtaataattctggatttactctagttttcattttagcacctctatttgtaattgttttcaaataaatgaagtgtattctaagtagtttaattgtgaaagaacaccacaattaaattgtaaattggatatgttataacggtcaacagaatattcggaaattaaaacctttctcaagaaggagtttcatgcaatcaataatacaagtagtggatttaagagcaaagtggtttaatgtcgttgtaattatgtacattagaaaaatttatttttgagtctagaaaaggattagattcttttctagactcatgaagaattatgaaaagcaaaattttatagatagttatcttaaaaataaacaaagagagaagaactagccaatgttcttctctctttttcatatgtaattagggtatccataactgtaaatacggatggtatagatttatggatgaataatttatttttaaattaataacgtaatacataaagatttttgtatgtaatattgcatatacagggaccactggtgaaaatgctgagcaatgtttttccatatggtaaattagttccttagttatttattttatttcattttcaatcgtgtaaggcttggggctaagatttacaaaggtgactagtaaaaaatataacaatataagtataagattttgtacttagtaatctcacaatttaaggcatgacattggataagtgtgaggagttcaatcgattttgaataaaatcaatagtatcagttgcaatttttttacgtttaagaacgatcccggcatgcccacatttataaatatatcgtgtaggtctttcccaagattcccacaagtagtctgtatcctcagaatgcacatatagatcatgcttacctgaaattaataaaatattttctttttttacttttggcaatgcttgactcggttcagtgattttccaataatctattaaatcatcatacgtaacaccatgatgttccaagtcttctctaataaatttacctggagttgtattccaaatagaataagaaagtcgatttgcatagaaaatggatgctaacacatcaatttcttcttcaacaagagaggttaagttagtaataaatccgcctaaactaattcctattagaatcagggtcccctttttatttgctttaatccatttaatcaaagctcgtaaatcagctaccgcttgtctagttgcttgtaatgttcgttcaatatttgcacttaccatatactctccactgaataaggattgatcgggttttctttcaaaatgatagggtagagtgaaataatacatattccacttcaggctggtcatatgatcgtggaatatttttttcacacgttcgttagaatccattctccaaccgtgaacaaagataacatgaggtgcattttcattttcatgtaagaataattccccagttacagagtcgttgcgtgaatcaccggattgaaccgaacttttatagttgaattgcccaaccatgtattcattttcctgctttgaatgcttaatgtcaaaatgaaaatgtgatggttttactttataaaaagattctatgttctttatatttaatgaagtgttagaaagggaagtaaactgaaatgctacacttctttttttgtgtaaatcatataaggcgtaccgatcaatgagttttgaaaaaatcaaattaacctcctccaaaatacatattgtttaaaacatagacaaaatttatgttttaaattaattaggaaatattctcttttcctaatagtaggtgcttgaattataaaaataggtgataaatttgtatattatattataaatcgtgcaataaaataaaactataaataatttatattaaaatttaagaagaatgttaacttgtttcttttcttattaaaagatgtaatttctatgaggaacttaacaattcccatctagatattcacaaatagcttctctatatttattgtatagaaattatacaataaatatattttttatattatatacattaaattaagcttaacctctttttctataagtctcttaaattgactaactccttaccaatattcaaaaacgactgcatttttgaatttgtgttctagtttttcttgaacaggtaaatgaataactacacataaactccttatatctctagttaaactaccgattagctccatataaactctagataacctatatagaatacaagttatcaaggaggtaagaaaaatgaattttatgaaacgagcaattctcagtatgaaaaaaaggataggaacatcattaattttgatggcagtttttctgattgttacaaatttggttctttcaggttacacaatccaaaatgcatcaaaaaaagcagcggatgctgcaagaaaaaaacttggtgcagatgttactttaggtcttgatttcgacaaaataggtcaaaaagctaaggaaactggagaaatgccaaatccgccgcagctcgatgcaaaagaaacaaatcaattagcgaagtccaagtatgtaaaagattataattacatagctaacactttcggtatttctgatgggcttaaactagtaggagcttcagaaggagaagaagaaggaaaaggtaaagtgggaatgacggctgcgcgaggcggttcaagttctggtacagaaatagatatgaatgcttcttttatgattgagggagttcgcaagactgcattacaagaaagctttaaaaacggaaaaagtaaaatcattgatggaaaaccaataacagagcaaatgaaagatcagaatgtagctttaatggaaaaacgattagcggaattaaacaatttgaaagtaggagacaaagttaaagtacaatcaggggataagaaggaaactcttgaggttgaaattatcggcatttacgaaacaaatgagcaagcaatgggtcaacaggctcctcctattatggatccagctaataaactatatatgccgcattcaactatgaaaaaattagaagtagaccaaggtataagtagtggtcaagtcgtgtatttcttgaatgatccacaatatattgatgcatttaaaaaagaagcaaaaaaatctaacattgattttaattattataaattagatgcgcatgattcattgtacaagcaaatgattggtcctatcgaaaatatctcttcgacttctcaaatgattatttatattgtatcgattgcaggtgcaattattttaggattaatcattatgctatcaattaaaggacgtcgtaaagaaatgggaattctattgtctattggagagaaaaagtggaaattgatagcgcaattcgtagtagaagtagtgtgtgtcgctattttagcatttggattatccataacaacaggagctaaagtttctcaatatatcggagataatttactttcgaatgaaattgctactgcaagcgaagaaacagatacttcgcaacatggtactgtaatgatggctggatctggtggtactctacaaaatcaaaaagaagatccaattgataaaattgatgtaagtgtaacaggagaagatgtagggaaaatgggtggaattggactagctattgctataatagcaacgcttcttccagcattatctattctacgtttaaacccaaaacaaattcttttaaaagatgaatgaggaggcttaatatggagacgattttacagtttaaaaatttggattattattatgaaagtaatgggaaaaatgtagcgatactagataatgttaacttttcttttcaaaaaggacatttctacacgattttaggaccatctggatctggtaaaaccacaactctgagcttaggttgtggactggacgtccctaaaaatggttatgtactgtataatggcaaagatattagaaaaattggtttggatcgataccgtaatcaaaatgtatctgtaattttccaatcttataatttgataacctatatgacagctcttcaaaatgtcttaacagcaatggaaattacgggtgttaaagtgcaaaataaaacagcaagagcattagaattgttagaaagggtaggactcacagaagttgaagcgaaacgaaacgtcctgcaactaagcggtggacaacaacagcgtgtagcaattgctcgagcactatcttgtaatgttgatttactgattgcagatgagccgacaggaaacctcgacgaggaaactgcaatggatataatagaactatttcaagaacttgcacataaagagaataaatgcattattgttgtgacgcactcacaggaggttgctaaaaaatcagatcgtgcagtgtatttaagtaagaagaagttggtcgtaaatgaaatctaatataaacatcgtagttttttaattcacataattttcaaaatctagacctttcaaaagcttatatttgatttataataaaatcaagccataatcaaaatggtctccctgtactgaatgttaaaatagtttgttgttcccgttttaataatataataaaaagaacttgtaggatattctacaggttctttttattataattggttacctatatcatgggataatcacacataaaaaacgggacattacctagatgtatgacctaaatatcgtcccgtttacctactctgtatagttattgcagaattaaacctacaatcataattaaactaaatactattatccaaccaaacgcacaatagccaaaaattctaatccatttaggtaattgatgcatgttaattttatttgtgggaactccttgcatagaaaacatcattttttgatctctatctctattattttgttgttcatacatactatcatcacctttccagaactattgcgtttatagtatatcagcctaaagaaaattatgtacagaataagaagggatagcataaatattatgtggtgaattttataaataaatgcatttaattgccatggttctaagcgctaatagagcactacataaataggactcattttcttcaaatattaagttgctggatatagatcaggaccaaggtaacgttcttttataatttgaagatgatgaagctcatgaccagcaataatgtatgctaatgcatgaactgtaacttcagaattattcgcatttcctctttgtgaccaagcttctttatctaagcttctaagtaaatgcagggtagattggcgaacaactattaaattcccaagaagatcttgcatagattgcttatcaaaagcagctctaagaacatacatatcatcaaatgaaaaacctgttaataagtttatacttactacaaaaacaaacaaactcgtcctatttaaaggagagtttgtttgtttttatgtttagataatggaatactcatgcaaaattgcacactatgttccatatttttcattgaatactttatatctagtgtttcaagaatttgtttaacaatatatagccccaaaccatttcctccagtatttcgatttcttgatttttcaattcgataaaatggtttgaaaatttgttgtaaatcttcatctttaatattgacacctgtatttataatttgcattttgatttgaccttgtttcgaatcctcatttaactttatatagactttttcattatgtggtgaatacataaccgcattgtgtataatatttttacatgctttttctaaaagagcacaatctgtataaatagaaaggtcaaaatcaatttcttttattatttcgatgtttttttgagaagcaaaaaattcgagatcttttgtaattgtacctattaattttgaaagattaactttctctacttttagtttgaaggtgtgttgttctaatttcgatacgcttaaaatttcacgaactaattgttccatactttcaataatttgatgatttttctttaaatattgatcgcgattttgataagggccaatattgtatatcattccttctaagtatcctttcattacagtaagaggggactttaattcatgtgctacaatcgcaaaaaactctctgcgttttgtttctatttctctttctttttcaatatcattttttaattgttcatttgctttttttaaatcaaacatagcttgttgcaagttaatagacatgtcattcaaactattagataattctcctaactcatctgtagagcgaacctcaattttttcggagaaatctaaatttgccatcttttgtgcaccttcattaatataaataagtggctttgtaataaacctggaataaaaataagcacttcctataccaataacgagcacaatgatactaatataggggagaaagcgtactaaaacctgtgaagcttcatcaatcggttgaaatgtagcaaacactataagcgttaaactaccatcttgaaattgaattggtttcgtaacattatatgaattgctgagggtacttgcattctcgaatcgtgttgctttagtaactactgttttttgcgtaccactttgaataaaagaaaatgaaggagagtaaataattactccttctttattttgaagataaagcatcgcattatttttttttgcgtattcatcaaaaagtggtatcgcatcttgaaacgtaagatttttagacttatcaatgatttcgtttatccctgtttgaagttgatctgttttatattgctcataaaacgtagggagaaagaagtataaagttaaataaatcaatactgcaaaggataataaaatgagagatgtagtcataaagagtttataagtaatttgcttcattttcatgagtttcacaatactattcatcaattttataaccaataccctttattgttttaatataagggatagctaattttttgcgtaggtttttaatatgtgtatcaattattcgtgtttctccaaaataatcgtaaccccagactttctctacgatattttctcttgtgagtacttttctctcattttgaaatagtagttgtagaatttcaaactcttttgtcgttaatataatttcaacgtcatttacatatactctatatgcatccacatcaatacgcacttctttaaatatcaaatgattatttacatttttatcataacttcttctaagtacagcttcgactcgtctaatcaaaacatgaaatgaaaagggctttgttatataatcatcgatcccaaggtcgaatcctttcatttgatcttcctcttcttccaacgcagttagcataataattggtacgtttgactgacttcgaatcattttagaaacttcaaacccattaagattgggcatcatgacatctagaagaattaaatcaaatgattgcttattaaattgtgtcataccctctagtccatctgaagcgactatcactgtataatgctgcgtcattaaaaattgtttaattaattcctgaatttcttgatcgtcctctaccacgagaatatgatagtttttcataatatcacctctggtagtcattatagccgtactatctggagtttatgtggagatacaataggaacttcataggacgtttaacgtattagcttcattttcaagaatgtgtattctccaaaaaaatatgattagccatattcctttttatgaaaaaataattgtatgcttgaaaaaacttatcgtatgaaaagctgaacgatttatatttctaaaaaaccaatgtataatattgggaactgcatgtgatttcttaaactgtgtgaacatatactttcgctacttactagaaggggaaacggaaatgaatttcaatataaaaaaagctagcgaaattatagagtgtacttcacaaactttagagttttttgctaatttagtaaacgattaaggtgtgaactaaggattatttaaatcatgcgagaaaggttgtgaaattatttgatgggttataaagcgatgctgtttgatttagatgatacattacttgatagggataaagcagtagaggcattatttttaattgttttagaaaagtgttatgaaaatgtagatggtgcggctaaaagcaacatgttacagaaattcaaagaatacgataaaagagaatatggcataagtaataaaacgacagttttagaatcattgtttgatgaattcacgccaaggtatagattgccacgcaattacatccaagatttttggaataataatttccctagatgtttttcaatagaccaaaatactattcatttcttaaatcaaataaagaagcgctttaaagttggaattataacaaatggctcaactcagaggcaaaaagctaaaatatttaacacgaatttaaataggtattttgaaacaatcattatttctgaagaagtgggatttagtaaacctgataaacgtatattcgaactagcattagataagctaaatttacaaccggaaaatactttatttgttggggatgacttagaaaaggatattgctggtcctcaaaatgcaaatataaaaggtgtgtggtttaaccctcagaaaatcaagaatactaccaaaatacaaccatatgccgagattaacactttggatagtttgttaagttatgttactccacaatatttttataacaagtaaaagtaattccatatatatattcaaaaatataaaaaaagagaaactatcattaatttcattgaccgtattagtaataaaaaatatgtatttacaacaaaaaatagaggctattttaatagctgaggctaatttaatctatgattaatacgaagttttgtaaaacaattttactcatactgtataaattataaaggggtgggactatggaaataaagaaagtagtaatcgatggaatcaatattgcggtcattaggaacgataaggtattaatatcggatgttcagtctgcattagatactatggcaacagttcaatatgaggtagatgcgaaacatattattatccataaatctttaataagtgaagatttctttgatctaaaaacacggcttgcgggcgatatccttcaaaagtttataaactacaaggtaaagattgctattgttggagatttctctatgtatactagtaaaagcttaaaggattttatttatgaatgtaataaaggaaaagatattttttacttagcaactgaacaacaagcaattgaaaaactaagtacattaaagtaataattatatcctgctaaattcccccatttcacttagttcatgattatatacgatatagaagaactgatgtttgtggtaaactaagagatgaataaagggggcgttttcttgaacaattttaatgatacgatccgagatttaaacaatatagtttacaaacctaacaatttaatgattacgaatctaaaagaagaaaagcaaaacgcagaatatgcaggatgtttattccacttaaataacaaaaccattcgttttagaaaatcaaaagttactcctaataaaattggtcaatttgtttctttttgggagaaagatgaaaatatgcgaaatagagctttctcttatgaagctgctcctgatttattagtaatcacttgtattgctgataataaactaggacaatttatttttcctaaagaggttcttcttaaagaaaaaatattgagaacacaaagtcaaacagggaaaatggcaatgagaatttatcctgtttgggataccactgttagcaatcaagctaaaaggagccaaacgtggcaacttcactattttgttgatttaagtgatagtaataatttgcctatagataaactattaaatttatattcgtagcttttgatttgcctcaaaaagaagtaattacagaaaagacatttgtaatgacgctttctattaatttacctcgtgaatcgtaatttttgtaccggtacagttaaatgaaatgtacattgttacagtgccccttaaaatttacaatcagcatatattatttaaacttataaatttttaaggggtgctaattatgacaagtttacaaaatcagcttttcacaagattaaatcttaaaaaacgtaatgaagtaacgtttgaagaattacctactatactcttttcatttgcacacactataccatttgagaatttagatgttatagcacgaaatacgaatcaaatctctctggaaaacttacgagagaaaattttaactagttcccgtggtggactttgctacgaattaaatactcttttttactatttcttaaaaaactgtggctatgatgtacaactggcattaggtacggtgtataaaaatgatataaatgcatgggcactggaggatggccatataacaattattttaacttatgataatctacagtatttaattgatgtaggtatagcttcgttagtacctcttgttcctgtaccttttactggcgagtctgtttcttcaaaaaatggttcgtaccgagtgagacgaaaagatacaagtaaaggaaattatgttttagaaagaatagatactgatggagaatggaaagtttgtcatgctttttataaacctaatattgatgagatagtaataaacgatgttcaaagaagagtgatagaagatgagaagtctatttttaataaaggaccaattgcagtaaagttgacgaactccggtcatatttcattaacgaatacaagtttaactgaagttattcatggggaaaaaactaagcgtgaaattacagaaaatcaatataaagagtttttatatactttatttgctattaagttatgaataataaagatagccggttcttattcagaagcggctatctttattattttggtgtaaatggttttcttctaatatgtttcggaaactgcggtatagttaatgtttttaatgtttcctccgcttcttcatatgtatgaaaaattggttcttttccatcatccccttgtaaaactagcccttcatctcgaattacatatggcataaaaccaccccatctagtaaagaattatgttcttttgcagcagaataatacgatttaaagtttgattttcttaatacatataatacactagaacagtacgaaaaagtatgtacaatgaattttgaatgtaaaggaagattattatgtcagttattgataaattgaaacttaataagtatacaaatatggtcgttattaacgaaccaagtgattatgacatttttacaggtaaagaaactgcattctcaaaagaacacgatgctatctttatatttgtagaaacgcttgatgaaatggtgaaacaaacgaattttattattagtaatgaagaattactaattgaaaaaggttacgtattcttcgcatatccgaaaaaaggtaatgctcgttatagtacgtttattcaccgtgatgagatgtttccggcattaaacgttggagaagatggttatgtgggagaaagcgacattaaatttgcacgaatggtaagtatggatgaagtctttactgttgtaggtttaaaacgcgagaagaaaaaaacaacgaaaacatctgctatgagtcaatgtgttgccgattatgcagatcgaattaaagatgttgaagcattattagctaatcatccgaatgaacttaagttttatcaaagtttaacgcctggatatcagaaagattgggcacgtaatcttttttctgtaaaacaagaaaaaacacgtgaaaaacgtctagagaaaatgatagagatcctttcacaaggctataaaacaattgaattattccgtaagaagaaaaaataatgattaagaaagtcacaatgctgcaacaattaattgtgatgagtacattgaaaaaagcattccttccattatactaaggaatgttcttatatttatataattagtaaaagagaaaaggtgtttgaaatgaaatcgtatattgtagttggatctggaattttaggagcgtctactgcttatcatcttgctaaggcaggtgcgaatgttactatcgtggatcgccaacaattaggacaagcaactgatgcaggagcaggtattgtatgtccatggctatcgcagcgtcgtaataaagcatggtataaaattgttaaaggcggtgcacgttactattcttcgttaattcagcaattagaagaagacggtgaaactgacacaggatataatcgtgtaggtgcaattagtttacatactgacgagaaaaagttagatcaaatggaagagcgagcttataaacgacgtgaagatgccccagagattggtgaaatcactcgcttatcagctgaagaaacaaaaaaattattcccagcattatcagacgaatatagttctgttcatattagtggtgctgcacgagtaaatggaagattattacgtaatgcattaataagtgctgcgaaaaaacatggtgcaactttcataaaaggcgatgccatattagtccgtgaaggaaatcatgttacgggagttacagtaaacgatgaaacaatcttagcggaaaaggttattgtaactgcaggcgcatgggcgaatgaaatcttgaatccattaggaattaatttcttagttacattccaaaaaggacaaattgttcatctgcaaatcgagaatacagcaacagaaaatatgccagttgttatgccaccgaacgatcaatatattttaacgtttgacaatgggcatgtcgtaattggtgcaacacatgagaatgatactggtttcgatcatcgtgtaacagcaggtggtttacatgaagtattccataaggcattagcagttgcacctggcttagaaaatgctacaatgcttgaaacgagagttggattcagaccattcacaccaggattcttacctgttatcggaccactacctaactttgaaggaattctcgttgcgaatggattaggagcttcgggtttaacagctggtccatacttaggagcggaacttgctaaattagcgctgggacaaccaattgagttagatttaaatgattatgatgttgctggcgcaattgaataatatagggtactgctaacatttaggaagaaccatgctaaacaaattcgacaaggaataagcagttttccctctgttaagagtaacctgtttatgaaaaataaaattctttaaaaatagaaggccgacattataaacctgcattaataatgtagaattgtgatgtcggctctttatttatatttatttaaaacttattttcgagaggagcttaagcaatgagagcgccatatcaagtattgatatttccttattaaatgaaccaatagtaaacaaaagtaccgtacatagtagatatatctactatgtacggtactaattttataacttcatgaagtaatcagttgaacaaatgggtgtcctgctacatcgccataaacttaacttaataggcatgggataacataattgaaaaaatattttaaattttctttattcatctagtgatctttggtaatatttaatttagagatgtaaagaaaagggaatctatattgcacatgcggaatatcttgaaatgattatttaattggatagagacagtagtggtccttgattcttaaggatgcgtttatttgtctatcttaaaatacatggtgtggacaattaaattcccattgctgagcagatacctttgtatatctgcttttatttatgggcaaaaatacatctctattcacacaatcatagagtccctaaattgggggattttaatcagaaatttaatgagaaatcagtacgaaaaagaagaagcactaacaggaggaaatgtctccagtgtatattgtttttgggatacggttcgacgagaattaaaacctgatagtattaaaattcatacattgctaaaacaccttgaaaacaaaggtttaaaacgtgtgccaaagtttctaggcatcgatgaataaggaagagagattcaattcattcgcgaacacggaaaagaatggatttaagagaaaagtcctggtgaattaatggattgtaagtgattaaaaagaaatgccaccctaaaattcttaagttgatggacatgcggctgtacccctgaaggaggactgatgtcgaaaagtctcgcgattgtcgtcatgggaggtcttattccatccacactgcatatattaatagtcgtatctattatttttgagttgatagaagtatggctacgagaagagagaaaaaccggagcgtcaccctatccgtctaactctataacattctgggaggatgtcacgttgataattgatttaattgtcgccaatttagtaatacctggcttgttgtcgttgtggatctggaaatcgcaaggatcgagcttggttgggaccgtaacttgtttgttgactactatgtcttatttcatattttactggctcggggattcctataaagctttgacaattttcggtttaatttggatgccatttatcattttcgcatcttatcgattaataaaaaaaacatatggaagtcctgtatttccacacgaaataggtaaattggcgactctaactatcattatcatgacctcttttatatttatttatttgaacatgactgccttacaatcaactttttataagaatcagaaggaaacagatcacttcatcttttacagctctaaagcggattattcagaggttgtaaagcttgctgataatttagaacagcattacgggcgtatcattggcttacttaaaacagagccaacgacgaagacaaaagtaacagttttttcaaatcaaatcaatctggtatattcgttggggctattttctaatttttggtcattaggcgtatttagcgatgaaaaactatttatcttatcaccgaaaaatcggtcttctatattaaattcaagcattcatgaatttacacatgtcgtactgtctcatattgacagtaaacgacctacgtggctggaagaaggagttgccaattatttagggaatacggatcttaatgtccaaaaagtgctcccaaccttggtttctgcggataaaatacctaactttgacgagataaatgggccagcattcgtgtatagaaacgggtatccatattcctatacgatcgtggaatttttggtaattaaatatggatatgagaaattaaacgacttcattcgacacccagaagaatataaccgaatatttggcgtcagcaaatcagaattacacagtctttgggttgattatttaaaagcgaattatagccactgatccaagattgtttgccgcacgcgtatctctctgattttcacctgtattatgatcgttctcgatgttttccactttccggtacttggtcctgctgttcatacaactatggatataaaaattattttatcaatatttataatgagctttctatactgttggatttatgcaggtttttgcagaataatgatgaatagattatataaagtgttgtattgacaatggcataatgaggattggagattgaattcatgactaacgttgcagttagaagaccgaatttgaatgatgtagatgaactatatttatttttccgtatagttattacgaatacatacaaagatgaaggattgtcacaattattagatgacatagaaaatgaaattaactcaaaaaagcagtatttgaaaagtgactttgatagtaacggagaaagtcgttactttttattagcaattgatacaagtaacgataaaatcattggaacaatcgaaatcggtccagcaagtacattgattaatagttgtacaggtggtgtacttaaaaatttgtatgaaataggaactgtattcatacttccggagtatcagagaaagggaatagggagtttattactacatacaatgtttcttacattacttagcagagggataacagaatattgtttagatagtggatataaaaatgcgcaaagtatatggatgaaaaagtttggaaaacctagctatgtattgaaagattactggggagaatccagtgatcatatgatttggaagaaaagtttacatgatacacctataatatttgaattataaaatgaaatatgcctctgaacatagcttttcttacttatgtatgctattatttatctttataataaaagaggacgtgaatgaacttgattaaaattaaaattcctgaagctgatgtttcaattactgaacgtaaacaagttattaaaggagacgagccaatcattactccaattaatggatttatcgatttccacttgttccctagagataaaggcggcatttttatgttttacaatattaatgacgaacttcttttcgtaggtaaagctcgtaaaattagacaacgtattaagaagcattttgaagataatgtttcaccaattaaaaatcaccgtgatgaagtataccgcattgatgcatgtatcgtagaagatccaacagaaagagaaatttacgaaacatatatcattaatgaatacaaagcgaaatataacgttgataaagtattctacaaataatcaacattaataaaaagcaatcctagctaatatgcaaggattgttttttatttagatttattcttcatatctttctccttttttcaaatgattagcagcaacaaaacagattacacctataaatataagtacaataccaaccgttttatgttttccctcaaagaaaggaatatctgaaataacatttgtcatacatagtcctaaaaatacaaggatagggcccacccaaagtaatacattaccgaattttgtgtgcttccacataataaccctccttaaccctctttacatatatatccataaataaaaagtaaattcatagagaaatatagtttttttcatatcgaaaatttaaccctcatatattggtacaagcaaaagagaaaggagaccatcatgaattggttagaagctttcatactaggtataattcaaggtttaacagaatttttaccaatcagtagtaccggacatctttatttaggaaggcatttgttccgattagatgaggctggcttatttttagatacgatgctgcatattgggactttacttgcggtttttatttattacaaaaaagaatttatatatttaattaaaaacccattttcaaagctcatgttattacttatcgttgggacaatacccgcagttgtaattggtttattgtttaaagacttctttgaagatatttcaaaaacaggaatcacgatcggttgggagtttttagtgaccggattctttctctacatggcagataaacaaaagaatggtcgtaaaaaaatggatgacataacatataaagacgcattaattatcggttcatttcaagctgctgctatttttccagccatttcccgttctggaatgacaattgtcgctgcattatggagaaaattagaccgtgaaactgctgcgtacttttcttttttactatcgacaccagccatcgttggagctatcattttgcaatttgtagacgtttttcaagggaaagcagaatctatttctagtacatctttaattgtcggaacgttatcagcagcgttttttggatacatagccgtttcatggatgattcaatatttaaaacgtcactccttaaaagtattcgcgtattacgtatggggattaggtattttaattttaatgttgcaatttactgatgtattttaagtataatgataaagaagttaattagtttaagatcctgtttcattcatacaaggcaggatctctttttattaagggggaaaatatgtttaataaggctatcgttattggtggaagtatggcaggaaagtttgcagcaaaagcattatcaacttcttttaaagaagtaatcattatagaagctggtgaaagatgggatggaaaatcttcgagaaaaagagttccacaaagtaatcatcctcacgtgttattaaaaggtggagaaaacgcaattgaagaattgtttcctaatattacgaacgaattaatagaagcgggtagtattataaacaactttacgcgtgatttgaaatggcatcaattcggtctatggaaacaaccgttcataggggaagtacatatgattcaacaaagtcgtcctttgctagaatggcatattcaaaaacgaatacatcaaatttcaaatattactattaaatatgaaacattggttaaagggttattggtagatgcaaagcttaacaaagtgtgtggagtaaaagttaaatatttagagacaaacacacaagaagaagttcatgcggatcttgtagttgatgcgagtggatttggctcaaaaagtatagagtggctacgagaatacgaaattaaagtacaagaagagaaagttcgtattgatttattttacgcaacgaaaatgttcaaacttaaagaaaatgaggagttagactgttgtaatatgctaatgtctcctagtttccctgataacccttatggcgttcttattcaaacgatagaagataatcgttattttgttacttttagtggatacgcaaatgagaaagcaccacaaacagatgatgagttttatgattttgctgaaaatctatcaatttctaatgttacagacttcttaaataaggctgagggaattactgatataaagacatacaaaattccttatcaagtacgccggcgatttgatttagtgaataatgtaccagaaggattattagttgttggagatgcgcaatgtcgttttgatcccgttttcggccaaggcgtatcagttgctgctatggaggctcaccaattgcaattacttttgcaagatagaaaacaacttgataaaacatttacacaacaattttataaaaaggcagctactataatagaaacgccttgggatatgacaacaacagaaatatcacgtcacccgcaactaaagagagaattaactacaaaacaaaaatttcagctatggtatacgaagcaaatatatcgactatccgcaagtaattctgatgtttatattcggttagtacgagtgatgaatttaattcgtagtccatttcatctctttcatccgaaagtgctactatctgtattacttaatcgaaagaaatagcaggaatataattgattaaaaaagaatgtataacagttagtaaatcaagaaggagaatatggaatggaaatatacatagagcaactaaagaaacaagatgctaaggatttatttacgtttgaacttacaaataaatctttttttgaaacaatggtaccaaatcgtggctcaaaatattttgaatttgaatatttccaaaaactactagacgatttattaatagaacaagcggatggagattcttatttttatttaattcgtaatgaagaaaaagaaattgtagggcgaatcaatttagtagatatagatacggaaactcgaattagttcgctcgggtatcgtgtcggagaaaaatttactaaaaaaggagttgcaacagcagccgtaaaattaattttagatgtagcggaaaataatgaaattactgaagttcatgctaaaacaacgactaataatctcgcatcacaaattgtactagaaaaaagcggattttcttcttatcaaaacgaatcagatataacatctgtagaattaaatggagaacatgtgaagtttgtacactatatttggagaaatacttcacacttataataaggaggacttattcatgaatgatttacgttatccaattggccaatttacatacaaacgtcctataactgaagaaatgattgatacatggattcaagaaattgaagatttacctaatgaactaacaaaggcaattaaagatttagatcagaagcagttagatacaccatatcgcgttggaggttggactgtacgtcaagtagttcatcacgtcgttgatagccatatgaatagctacatacgctttaaattagcactgacagaaaagaatccaactattaagccgtataaagaagagaaatgggcagagttacctgattcaaaattaccggtagatgtttcactagtaatgctagattcattacataaaagatgggttaatcttttatattctctagaaattgaagatttagaaaagacatttaaccatcctgaaactggtgaaacaaaacttgctgttgcaataggactatatgcatggcatggtcgtcaccataccgctcatattacttctttaagaaagcgtctaaattggtaacatggagattatattagaaaaggtgacagaaactgatgcagaagttatatttcaaatgcaaatagattcatttagctctttattacataaatataaagactatgaaacaaatccagcaaatgaaactattgaaaaaactatttttagaataaataatcccagcagtaatttttataaggtgataatagattcgaaacttgttggagcgatatgtatatccgcaaaagaactaccttataaattttggattagtccaatgtttattcatccaatctatcaagggaaaggaattgctcagaaggtacttattttaattgaagaaatgtttccagaagcacgaagttttgaacttgctacgattttagaagaagaaagaaattgttttctatacgagaaaatggggtataaaagaacagaagtaataaagaaattaaatgataaaactacacttgtttattacaaaaaagaaaggtaaagcatttaaaatacgctttacctttttatgttattttagattaaatatacaaaaacaatgtatgttcttccaaaatactcgggttagtaattttgaaaatgaataaagatacaaaaaccactactttgtcgtaaaggttactagcgctttttgaatgcttaaaatactatcgtcacctttaaattctttcgtaattggttcctccatactagacacccaaattttaagttctgcatctaaatcaaaatgcccagccgtttcgatgctatattgtgtaatacttttataaggaatagaatggtattctgtttttttgccagttactccttgtttatctactaatataagacgacgatttgtaaatacgattagatcacgaattaatttataagcatgctctactttttcatcgtctagcataatcttctctaaatcacgttctacattttcagaactcgtatttgatgcatttcctaaaataccgctaaataaacccatattaaattcctcctttaatatatgtggaatgaattacttatattgtaccatgttactcacaaagatattatcacattactttagtagtttctggttattgttgtaattagtttatataacctcatcttaaaatcttatgctaatatgaaattaagaaaaaagaagcagagggatatagaatgaagaatatcggtttagtattagagggcggaggaatgaaaggtttatatactgcaggtgtactcgaatatttcatggaaaagaacttattctttccatatgtagtcggcgtatcagctggagcctgtatgggagcaacctatttgtcgcgtcaacaagggagaaataagaaagtaaatacagagctagtatcagattacaggtatatatcttatcgaaatttaattcgaaaacgtgaattatttggaatggactttttatttgatgaagtacctaataaaattgttccatttgattttcaaactttcttaaactgtaatgaacaatttgttatagggacgactgattgcgaatcaggacaagctgtttattataataaaacagaacatggaaatgatattttaaaaatcatccgtgcatccagctctgtgccgtttatagcacctgctgtagaatatgataatcgaaaattactagatggaggaattatagatcctataccagttttaaaagctcaaactgatggttatgaaaagaacgttgtaattatgacaaagccagaaggatacgagaagcagcgaaataaattttctggtctagctaaaattctatatagaaaatatccgaaaatcgcagagaatttagtagaccattatcgtttttataacgagacgatatcttatatgaatcaagaagaacaaaaagataatttttttgtaattcaaccaagtgtacagcttcctataagcggaatagaaagaaataaggaaaagctcgttaatttatataatcttgggtatatcgatgctcaatatcattatgaaaacttattaaattggctagagaaataaaggagtggtaggtaaaaaggttatttttaatgaattgcagaacatgcctagtctactgtataaaccgtttccgaattgtgacattcgaaaaataagaaaagattttaataatacgtttacagaagatgattgtataagcgctgatttaaattattattggatgcatacagcaggtactttaagttacgtgtttaataataatgaacaggagattgtgtttaatcaaattaagtggctaagaaaatcgttttttgagtggtttccgcaatatcgttttctagaaacagagattataaattatcccattttatatagagatttcatgaattatgaaaaaacccgtaagctattactttattatcttactgaataaaaattaaaacgtacaagtgatgctgtttgtacgttttttgttcataaaatatacaatattaataccttgtccatgtaggtattttaacgagaaaaaagaagtacatataaaatatgtaagagggaggagatagaagcttgttagctgttttccttccaattcatgtccaactcaaatatttcgagtaaaattcgcttctaaatggtattatcaaatatcaagaaaactaatttagaaacgaagaagggacaggtttaatatgaaaaacgtatcaaatgtagataaagtagaatccatacagtctttacagtcaacaatccgtaaacttgaaaatgcactatctcagatgactcaaaaaggtgcaaatactacattagtgaaaaaaagactcaaagcagctagtatcggcttagctatgttagaaagtatttggaatcaagaaacccatcattacacccaagaggatttagcagacgctcgaaatgttctaattggtttgttgccatcaattgaaaagatttatgttaagtcaaagcttgggagtcctcaaagaacactgttagaaagaagaataaaatcattggaactttctattcaagcaattgatcatctttctaatcaataacttctctaaacacataacttacgactacttttatatagggattctaatgaaaaaattacatatagaatactacaaaggagaaagagaggtgatggagaaggtaccaataaagcgtctgtgttaaaaataggtatggacgtgcagtatagcagtcgttttccttcaaatgattatccatccggaaagattgaaacatattctttttatagttcgattttaaataacacacgtaaaattcatatttatacgcctcatgattattctcacacttcacatcttcaagaacttctcattgtatttgatgggaattcattcattcataaccttccaatcgcaaaaacacttaattatttaatttacaaaaatgaaatcccatcttgtattgctgttgctatagatcctgtcgatcgattagaagagctaacttataatgataaaatgaatgcatttttcaaggaggaattacttccgtgaattcaggcgaagtatcgtgtgcatcaagaaacaaaacatacaacaattgctggtttcagtcttggtggcttagcagctttttatgcaacacttcaaaatccacatgttttcggaaatgtgttgtcaatgtctggatccgtacattggaaaaaagatgattatgaaaatcaaatttaatcaatagattctaatgcgactcatctctattcttacatagcagtaggagaacttgaaaacaaacctcttttaacggctaatagacgtctgtataaagctttaaaagaaaaggaataccaaattacttatgaagagtttcaaggcgatcatggtagcgtgtggtggcgagaaaagctattcgaaggattaagggcattggaatttacaaaaacgacactaaaaaataaaaaggagagagaagctatgaatcaagaagaactagataaaaaactaaaaaagcaagagattttagtaaaagatgaaaaagtttggtcctatacgtatgaggatcatattagttctatcgttaaagaggcagaaaagaaagggtcatttgataatttacctggtaaaggtaaacctcttaatctcgataaagatctttcttacaatcctgaaaagcaactttatagaactttagcaaataatcatgttttgcctaggtggattgagctttcaaaagaaattgacgatttaaaagaaagactaaaagaaaatacaaatacggcagaagcagcggatttaattcgaactattaataaaaaggttttagaacataatttactttgtccaccaagtgcgcaaaaaacgagggtgaaaacggacttttaacaatttttcacgaagctatttcttgctatataattaagtaaggcattttcaattcattactaaagggaggcaaatgtgatgaagaatacgtatcaacttcaaattccgacagaactagagcagtatcgtagtattttagaagaaagtataaaaccgtatgttaaagtgtctggaacattagcagagacaacactttttgagagtaagtttggtggttatccgtatttacctatagatcaagagcatcctaaagactcaaatggacaacctatgatgctacttgcgcagttaaactttgaagaaattccgcatgttgaatatatgcctcaaaagggaatgttacagtttttcgtaagtgctgatgatgagctttatggagcagattttgatcatccaacaatccaaaaagactttcgaattatttatcattctacaattatagaagatttaaataaggtaattactgattttagttatttaaacactttagaattagaagactttatcatacctgaagcagcaaaactgaattttgagttagcttatcaaccagtaacaccaagagattatcgatttgaaatgatttttagtgataacattgattgggaagaaattgttgatgaagaaaataatacagaattaggcgaactgtatgatgatttatgtaaagatcaaggacataaaattggtggatatccatttttcacacagacagatccgagagaatgggaagaaaaataccagcaacatgacatattattgctgcaaattgatacagacgattcattaaatattatgtggggcgattctggggttgctaatttctttatacgtaaggaagagctgttaaatctagatttttccaatgtcatttacaattgggattgttactagaggatataaataaaataatagcaaacaaaaaatcttcctgaaggtgaggaggatttttttatgttaaaaataagcgttatgttaactaggataagaaacaatgagtgtaatgaaagtcaagcctaaataacagaaataacaacaaataatgtgaagttgtaaaacgtgtgcaaatagcaataaattcataaagtaaaacataaaatataattattaatttatattttgtatagaaataatttttctgtataaaaaatttcttgtcgatcaaaaatgtttttgattcgataattcttaattgattattgatttgaatttgctgtgatggatttatagcaaaataaatgataaaaactgtagaaattcgtttagataagattttgtgtaaatctcactaaaaatctctgtttcgtctcattaagtatagtttacttggtttttgatacccgatatcgctttgtccctataactgcctataatatatattatgttaactgtaaaaaagtaataaacttactaagttttagttgtgcttattatgatccccttttccaccgaattagtaatgtgtgattggttatgtatttattcgctttattagctattgataataatattttcggatataaattagattttaaataataaaaatacaattcgtttaatctgttcattttaaacgaattgtattatgatgacgaatatttttttataactagtttgctacagcgattgcttcgatttcaattaataagttatcgttaattaactttctaacttctacagctgaacttgctggtggattattagtgtcaatgtattgatctcgaatatttctcacaatggccatttgagaaatatctgttaaaaaaaatgttaatttgactacatcattaaattttaattccgaagtttccaatgcacttttaatattttcgaatacttgtcgcgtttgtgtagctaaatcgtcaattccaactatttgaccgtcagtgttaatcgctacttgtccagatatgtaaattgttcgtttagcgtttgtaacttcgactacatgcgagtatccaaaagttggtggcatcgtttctggattgataaatttcttttgcaaggctcttctcccctttaaacatttcattttcttaatgttaggttttgatttcagattatcctctatttactaataattatttatcgatttagctgctacatttgtaaaagtgtattagcactttaatttaaagttattgatggattatgtacgtttgattttttttgtgcttgttataattacaccttgttttattaattcttcagttacttttgtatagaaaaagtgataccaccagataaaaaactcttcataagtaatttcttttgagtatctgctgctggcaaagtattcttttaaagatttatcgttttcattaaacaataagactaaatctttactgatccaagatgaagcattacaagtaaatattgaagtttcgttccttttatttttatagatggcgaattatctccagagaaaatcattttagcttcataagctgtatgtaatatattctccggaatattattagtaaacacttcataacccctcccttactagtaaattcattgtaagatttatgtatttactaacttctataaacgaaaataagtatcctctaataatctcaaattaaaaaccttagcatagatatactaaggttttttgtatttttataatgaatgaattctttcatagtcttttttaaattgattatcattttttaaccaacttttaaaagttggttcctttatttctaaaatggaacaagttttagcgatacatttatttttcatatattccttaaggaaattttgttttctctgcttaacagcagattgggttctttttaggtttcgatcttttaattgatctagacttagactttctttctgaaattcttcatattttctatgcaaataaatatctttgtctttataaatccaatttgaaaatagttgtattgattttctcccggttaaaatgacgcgataatgtttattttgatttagtaaatcggctggtaaattgtgattttgtagtacctgatttaaagaattcataaagctatatgatcctcctacaaagcttactgtatacgtttcatacttgacgtaaccatccccatcaaaatatccacgaacaaaatgatgtaaatattcttctggtacaaaaggaaattcgatgttaaatgatttacatggcataattccgtgcatgttcataaggtcgtcttttattgttttgctattaatatttagcatatatacacctgtttttttgttttggtatagcggctgatttgtttttagttctttttttatatcttctaaaatataactttctttttgtgatatactgacgcattgattttctttttgtataacgccgtcagctgctataaatcctaaaatataagccatattatttgaccaagttttaaaataattttcttttatgtcatactttctcttccaattccctatagcgcgccttgggacgttgctgtctgataaaaccatacgaatataccttgcagacacattagcaagtgtagcgatctctgaggtgcttttcccctctgcatatagctgcgttatttcagattttgatagtttacattttgatttcttttttcgctctatgtgcacttacatcctctccttccttttaataatttgagacttatcttcttctataacatataacgaaacgtacgttctttgttgcttataagaagaaatttactaaattaaaaaagtttacatctacttaatattgattttatctgctgctacatggtttttattttgcatataagaataatgaatttgacaaatttatgaaaggtactgcatttaaggtgaaaggtaaaatgatttcgtttaaactacaaatagctacaataacaacatacgtatattgttaatcgtaaaaaggagaacgaatgaataagaaatatacaaaccaaattcatactgatatgagttttaaaccgaaagatattataagtttaatgacggattactttaaaatgaaatcaaagctgcgtcctataaaggatttgcctgttgttttatcaaataaagataatgaagcgttagagagtgttacatggtttggccattctgcttctcttttgaaaatagaaggtaaaaaactgttattagacccgatgtttggagatgcctcttccccatttcccttgtttaatagtaagcgttatagtggtgctttttctttagaacgtgatgaccttcaagaaattgatgcgattatcatttctcataatcactatgatcatttgaattacaaaagtattatgcagttaaaaaatcgcgcaaaacacttttatgttccaactggagttgcacaatatcttattaaatggggtgtttcacctagtaaaattagtgagcataattggtgggacgaaattacgtttgataatattaagttagtatgtgcgcctgcaaggcatttctctggacgtggtatgacagatagagatcgttcattatggtgttcatggcttattcttggtcaagagactaaaattttctttagtggtgatagcggttatgcccctcactttaaggaaattggtgataaatacggtccattcgatcttacattaatggaatgcgggcaatatgatccgaggtggtctgctattcatatgttgcctgaagaaacggtacaagctcatattgatgttaaaggagaattacttcttccgattcattggggtgcttttacgttagcattacacgaatggagtgacccgatagaacgtgttacgaaagaagctaaccgtttaggagttaaaattacaacgccacaaattggcgaatctattacgttaaaatctacagactatcctttatccgcttggtggaaggaaatttaattttaaaatataaaaagagcgaatcctcttataaagaattcgctcttttttctgtatttaaacttatttcactatattggatctcccactatctaatactctatttgctggtacactggacatttcaaccactgtattcatactcttatcagtcagttcaatgagttcgttttcatgttttattttatttaaatcccacaccattccatgaaattcattatgttgaccacttacctgtataatgctttttgttttatttgaaggctgtatttgaaggtttgtaaattgattcccactaatttcatttggcgtagttacttgactatccatataaatcatatttacacagtcttctaaagaaaagttcataaaacgattggcatttatccaagcttgtccggtgctcggttttttcgctactaatttcagtccagtttccattcctacaactttaatattttcgaagttaacaaacgaaatttcattttcttttccagcagagtataaagaaattccggtacctttattcgtttccgtccaattgataatatttatatcttttatttgtgttttgttccaagtgttataatatttatttttaccgtctaaataaataacttcagagttaaatttaggatcgtcaatagttatatacgctccttcaatggatgcgtttttctctagttctaaaactctaaagtttccctcaactacaaattgggatccataaccaaataataatttcacaccttttttaacaatgattggtgacgtgattttatactttttatcatcaagcaatacagttttaattttactagactctgctttattaatagcagattgtatttttattgaatcattttcccctttaaagttttctacatacaagttagtacttttagctgcatagtcttttttgttgtattgataaaaagcaaaaataattaaaactataccaatgagtaaaacaattattttcttcatcgtactcaccccatatcgattaatctatggcttttatattcaggttattattattttgctttgtatttcagattaccattgctgctttgtctattaatcccttcctctatccttaataagctcttactggcgatataagatgtactgctgcagattgctctcctgcttcaatcaatatcggtcgcatagaacctccaaaacttaaagtaatcgtttcttcttttattgctcttaaagcatcaaccataaaacgcccatcgaaagatatatttaattgtttttcaccttgaatcgcatctatttgttgcgtttcagatattttcccaatttgagaagcgtttgaagaaattttaattgtggattcgtttatgatttctaagttaacattgttattagcccattcacttgctaataaacttgatcggtctacaccttgtaatatcttttttctatctacgttaataatcgttttaaaatcatttggaataaggttagaaatattaggatatttcccttcaattagtcttgaatataatgtagttgttccgagcgtaaatataatatgactctctgaaaggtagatatatacgaattccgaattgctgttcattaattttagaagttcactaatggttgcgcttggcacaatacaatttgcttttacatctgaggaaagtaatgtttctcgtatcgctagtctatgtgagtcagttgcagcgcaaattaacttattattagataactctatatgcaccccagtaagaacaggtctagattcattttttgctaccgcaaagactgtttgtttaaatacttcaatcaattgctctgtctctaccttgatttctgcatgattgtctataagcggtacattcggaaactcatctgcaggaaatccatttaaacttaatgtgatttcttctgattgtatcttaatagtttgctcattcttactttttattgcgatatcacttggcattttctttattatttcaatgaaatactttgcaggtacaaccatagttcctacctttaaaatagttgcaatcttttcgtcttcaattgaaacaggaatgaatttttcaataaaaatatttgagttacttgcaattaaagtaattccagattgatctgcagttatttttataccagataatataggaattaaagattttgttgatattgctttgttgacttctgaaagtgcttgagtgaattgtttgtgattaacgataaactccatgtttcccccgccttacatgagataatatttttatgaagattgatgaacgattgttccgttaaaaaaataaggtactgtttctttcttttgtaataaatatagtaaatgttctggtatgcgtaaatacggtgctgctatatgtaattccatccaagtaatctcttcgatttcttttggccttgatatatatgtctccccgccgattatttcgcctagaaaattaaagaaaattgcatgatgatctctttcctcgaaaaaggcttcactgatagaacaaatcccgtttacgtttatgtgtaaccctgtttcttcttttacttctcgaattactgcttcttctaatgtttctcctagtttaactgcgccacctggtaatgtataataagaaccattttcccctttgttttttaccattaagatcttttcattagttttatcgtacaaaatcgcgtatgtaacattaacttttttcatatgtacctcctctattttaaataaaaggaattttctgtcttctattcattctaccattaactccttttaatatatataagttagttaagtcttgcctttaccgctattgttggagttaataagaataggctactgatataaaaaaagaacgtaccttaggaagattatccaaagtacgttcttgcagttttagtataaaaattgattcaattaatactgaaattaataataacctcgcccttattgcatttgtatttcaaatactaacgttaacaaattctatatactttttaaccgtttttctaaataataatgattatgtcctttcggatgatcttcacttactccaattactttatatccatgtttcttataaaaatcaggtgcttggaaactaaaagtatctaaattaattaacctacaccctttttcaattgcaaattcttcaataagctttattaacttgcttccgtaacctttatgcctatattcttcagaaacccatagaaactcaacgtgtacatggtgccaaaaagttattgctgttaccccacctactatttcttctttttcatttcttactatgaaactaaccttttctgaaggtgttttttcttcatctgcaagatatttttgattgtattcaattactttctctcttatgtaatcactatcttcttgtacccactgctgtactattttcattttaagtgtcacgctcctttttacttatctattcaattttataatgaaattgtcctgtctttaataagttcgtaaagaagcaaagttaatggaataaaaaagagccctaacatgaggactctttttaaaattaagctactttccgatgtaaatgttttagttcctttttcttttctacatttggtgggcggattaatattgaaataatgaaggaaataacacttaaaacaccgattataatgaaagttggttgaaatcccccgagtatcgctccaataaatgatcctgcaagcgcaccaaatccgaaaccttggtagacaatcccgtaatttgtactatggttttttaatccaaagaaatctccgacaatagctgggaatatagttatattaccgccgaagcaaaaggcgacacttgctacacaagcaaaatagattccgtaatttagcggaataaaacttaaagtaaagactgacaatcctataataataaacgttgcagagacaattttcattcggccgattttatctgataacgtcccaagaataattctacctactgtattaaaaattgcaatcatagcaacggcgtttgcagcggttgctgcgctaagtccaacgagttgtacaccgatatcttttaccatactgattaaatacaaaccacccatacacgaggtaaataacataaaaaatagcagatatacttgtttcgttcgcatcatttcacgcggagtatagtcattgtgcaatgtttcagttacagcattacttacaattgcctcacgtaagaagaacgatccgattaacactaaaagtaacacgataataccccaatataagaatgcttgtgatacaccaaggttatcgataaaatttccgtttatatatctaaagattaagctgcccattccatacgctgatacagatatacctgaaataagccctttccgatttggaaaccatttaattaaattagatagtgatgtaatataagctgttccatccgcataaccaacaacaacaccagctaataaatataatagtggtaaggaagaaacttgtgaactaagtattaagccgagtcctaaaacaattcctgcagtagcaataagtttccgaagtcctaattttttctgcaattttgctgcaaataaagttgagaatgataaagaaaaacttgttatagagaaagttatcgctactgaattaagattccatccaaacttacttacaaggggttgattaaataaactccatgtataaattgttccaaggccaatttgaacaatgattgtacctagaacaattagtaacggatttatagaagtttgtttcatactaactgtccccttcttttatcttgacatagattttcacagttagtatatccatcgtaaattgcaagatactgtacggaaaatggtaattaagttcatatacacaaaaagacacttcataaagaagtgtcttttgcaggttatatcagatgtttctaaagaaagctttgttaagataagccattttcgaatgcttatgtatatatgttatcaaataatttcttatatgtgatgagacttaagacgtatttttcattcatcatatagtcggatgaaaaattaatattcgatttcatcaaaatccttcggctgcggtacagtttgcatattagctgcatctttaggatcgctataaattgcattttgctctgtatttacatcttttatattttgttttttatttttgttcactttatctttcacttacaatcactcctttttgttataggagtaattatgccctattaccgttactaaatgtatcagcgactaaattactaaattcacgtaaataatataagtaattatcaccgccgtagttatatcttttgttatacatttttgcaacaactacattatattcaggtattactaaaatagtcggtccagtaatccctaatatttgatatgacccttttggaacacgttcaccaagttcgcttaattgtgcaggttcattttgaacgaaccaaaacaagccattttgtggtagctctttatttacatatgttggactctgcaaactcgtagcgatttttataacttcttttggaacaatttgcttaccgtttatcacaccttgatttaaatgaagattgccccaataagcaaattctctagctgagacaaacagatttttttcagtaccgtcatctaccgtaccaatttcactagtcgcgtcttcatttggattattaacaacgtcaactaaattttcatctcgctgaactctccaacctgtttcttgaaaattagcaggcttaaaaacacgctcctttaacaattcaggaaaacttttgttatatagctgataaataagacgtgtcatcattcttacattaatatctctatatgcccatgcttgtcccggttcaaattcacgaaaaattgtcccgtcattcatttcttctaatccgtgcgaatgtgttaccaaatgtcttatcgttgttttaccaagcaatgcaggattaaagtctttaaaatattttatcgcttcatcatcaatagagtttattttcccctcgtaaagcgcatacgctatcattaatcctaaataactttttctagcagaagcaacgttgaactgcgaagatgcggttacttttttattagtcgatgtatttgagtgataaccgctataatgctctaatacgactttattattttttataatacaaattgctgtagcagaactatgatttttttcttttatattctctacccaagaaatcaacttatcatatgtatacaaataaatcccccttaatacacatcaaaattacagtatgaaagaaaagtataaacagtatttacacctttctttcatataaaatattaatgatgtactatatttaaataatccaccagttccagcaattaaagcaaccaaaacatccggcacaacctacgcaaccaccacatctgccaccgccgcaaccgccacagcgtccaccacaacctccgcatccgccacaacgacgtgcatcgccttggatgtaataatatggatattggctttgttgttgatcccaatacacaacattaccagtttgataatcattaaggtttaatgtttgtaattcatgttgaaactgattcattacgaacccctccatttataaatataaatttcgcccaaacgttaaagtttatatatttttgtaaacaaaatagaaacaagactatagactaaatgcgtacatcaacaaaatatgaacttacactaggtgatgtaccttgtttttcagcctattttctttatatttattcgatggacgtatttactataaataaagtgatttaaaaattactaatccaacaatttagtagttcatcacttaactttctttctagtaattccttcactaaaggcattggcatgatttcataatgatttaaggcttctttattataatctattcagtgaaatgctaaatgagactcgctcgatttcggtgttaagtccgtatgtaaatcttgtgactctacttcaaaaatgtgattaatttcatgatggagcacttctttatcttgccattgattttctatgactcctaaaaattgttgtatactacagtttactccaagttcttctcttaactctcttattaatgcattctctactgattctccaatttcaacatggccaccaggtaaaaaataatgatggccaatatattcagcaactaataatttttcatcttttatcatgactgctcgtacaatatgatggaatttacttttcaattgatattcctcctagttattcaatgtatagttgctcaaaatagtcatttagtattggtataatataaatcataggtgtttcatacggatgcatatcattaataacttcaagagcatcttttacaagttctcgtttacactttatttcaactttacattcttgcccttcgcatattcgaccaatttctccattaaaaggagatgcctcgtctaaaggtctccaatatcctttcactgaactataggaaagacaatggtcatattcgcccgttttacatgctccaattttatttaattcatcccttaatgtttcaatatattcttcaggaatgaatacttcaattttcaattcagtaaattgcatatttcatttcacacctttacttcataatagttaaacaaataaacgatatacttgctcaccatcatactcctgtcctaatgatatgaaaccatatcgttcatatagtttctttgcagagatattatctttatgtactgttaatctaatttctttacacgatttaaaagtattttttattatattaatactttcttgtaatgctgcttttccataaccattaccttgctgcgattgatcaataataaatccgttaatccaatacatatctgatgtctctcttacaacagcatgcataacaaaaccaaccataaggtcaccatcgtatatagcgagtggtatgtactctacattgtcaccatctggttttatatatactttagcaagcgaaactgctacggatggaacaaatttcaactgattttctttaacttgtagttttaatgcttcttcccaattttctctcgtaacaacctttaactggacattcaatattgtaagctcccttatatagaggatgtatgtttatattcaacgtagcgaaataattccctttttcgacaacgacttataacataatttttataaaatcttgaatgaatttttctgcatctatttctaaagctatacgggctccttcagatttagagttagggcgaaaatcagcaaatgtttgtcctttcgtatctccgtatgtatctacattcactgtacgatgcgcaaattcaaaaaaactttggttaactaatccacttatagcaaccacatcatgaagcaatggcccttcgatagatggattaagtttttggtatgcagaaaaatagtaatcatacattggtttcattatcgtatggaatggattctttgaattagcttgaatatagtcaaacacatttggtgttaacacagctttgtttgttacatttaaagggaatatgaataaattctttgcttgatggaaaacaattttacttgctataggatctccatacacatttgcctctgctaacggcgtaacgtttcctacttctaaaaaaacaccacccatgaaatagattccttttacatttagcattaaatcattccataaattaaaagcaattgctaacgaggtagatcttcctacatcaacaattgtcaaatcttttccgtactttataagaatcgcagcaatactgccgaaattatatattggaatagataatacattttctggaacatggataggccctaatccttctgctccgtgaatttcaggatagtacgtagtaatttcttctgtaagtggttttgttgcaccactaatgacaggaatgtcttgtctatttgctaactgcaaaatatacgttgcattatgtgcagcatgtatatgctcaacatttccgtatccagttacaataccgacaatttcaatttcgggatgcagtaagccatacataatggcaaatgagtcatcaatacctgggtctccgaaaaataatactttttccaagaaatacgctcctctcacgaaaaaattgagtcattagtaactatgtatatgaaaaaagcaagtatatctatgcaaattttagaatggataatgttttacaaaatattaaaaaggaactagcgtatgctaattcctttcttgagtaaccattctcaaatttaattaattatcgtatccttcataaattgcatcatttatttgattttgtatttttgtatcatcaggtacaggtttccaccaatttcctgtaataaataacatagttaataaattataactatcactaaaataactttctctcttattcttcatccaatcccaaccgctatttacccacttttgattattgctacttgttatacttgcagcaataaacggtgaaacaaatacagcagttgaataactaccaatattagatccatttaattgataaccatccacaattttagaaggatttccattcgttttattttgaatccacgaagaaactttatcagaaatgactttacttcttttctcgccgtacatcgcatagtccattacaattctcaatggtacccgactagcattgtaataatatgcatttgtatattctgactcatctaagaagtctttaggtgcgggttgtggtgggttttttacaacgaaatctgaaataagtcctgtatttggagagtatgtattactaaattgcgtataaacatcgtacaaattattaataacagtaagccaagttttatcacctgtaaattcataaaatgctctaaggtgtgacatcatccaatcagatggtctcgtatcaagtgaacttttagaatcccaatctcctaaatttagtcggttattatttgtaacattactagctttaataccttttgtaatcatgtcttgtgcttctttcaaataattaactgttccattagatccccactgcttatgagcaagaagaagagaatacgcaatatctaaatctccatcagtagcagaatcaaaatgaccttgtgcttttttactatctgcgacaacccatcccattaaattaggattttgagaacttttaaaagttcttgctgttttaaataaaccgtcatagattttttgagcattcgaatcataaccagccattaatactgtaattatcatcccatacccttgaccttctgaagttccaagtggcttaaacccatctgcatcacctgtaatctctccttttatgtaataaccaccaggtaaagaagataaatcatttttcaaatatttctttttccaattatcgtagtaacttcttacagaagcatttaaactttcctgtgtaacatgattcggttttataacacctgcataattaacttgctgcggaaatggtttcatttcctttgcagcagctacttgttgattaactacgggaatagaattttgtactgaattgtccgttacacttgctgcgaaactagaattagaaaaactagctagtccgattcctacaatagaaatacatgtgaaaatttttctttttccattcattatgttgtcagctccttttaaaatgcttactacataaaatgtaacatacaatatttaactgaaatacaaaatattatatttatcaacataagaaagaaactatataaaaaagtatcataaaatcattattgaattacattatacggattgattatttactaaattcctatgtttttcttttcttaatactggtatatgagcaatcacaattccaagtatagtaattccaccgccaattattgaaactaaagttggcacttctcctaaccatatccaagcaatgaaacacgcagttattggcgttaaatatagagaacttgttgcttcagaagcaccagcacgagatataatataggccaatgcaatatacgggagtactgttggaaagacacctaaatatataacactcaagttaacttcaagaggagctgctaatatttcttgataaactccgggtaagaaaataagcatacatacagtactagaaaaaattgtatatatggtaaatggtaagaaaccgtatttttttaagtaagatgtttggaaaacgaaaaatagactttctgaaatcgccgctaataatataaataatcccccgctatttaattgaatagcgtcgccttggctaaatgaaattaaggcaattcctgcaaaactcattacaccaccgatccagccatttaatttcattttttcattcaaaaaaacagaagcaaaaattgccgtcactattggagtgactgaaattattaaacttgcagatccagcattgactgttttttcgccgtaatttaatgcgatgtgataaatagtaaaccctaaagcaccaaatataaaaaatgctgggatatcctttaaatccggtaatcgtagtttgtatataaatgaaaataacaaaagtataaatgaggcgattaataagcgtagtaaagtaaggtgttcaggcgtataagattcaagccccagacgaattgctggaaaagcagttccccatataagaattgtaaaagcatgagcacatataatgcgtaaatcccattttttattatgcatgttttctctccctccttaataaaccaaccatttttaaattaccaattatttcttttcatcatatttaatagttgatacaatgtcttcaaccagttatttatcggaaaaaccaaccactttgaatcttttaaattaacgaaggagttttttatatgacaaccgataaaaaagtgcccaaatatcggcagataatagactatatgaaagaaaaaattgaaaacggagaatggccaattggaagtaaaatccctagtcagcggcagttagcaaaattatttcatgtaaatcgaagtactgtaataactgcgctagatgaacttatggcagatggtttaattcaaggacaaatcggagcaggaacaattgtaacaaataatacatggtcattattagcaactaatcccccgcctgattggagtgaatatgtaaaggccggtattcataaaccaagtaagttaatggtgcgagaaataaatgaagcagaagcaaataaaacgcttatccatcttagtaaaggtgaacttgcacctcatctttttccgctcgaaactatgcaatctataataaaaaacgtcagtgaggaattagattatttcggatacgaagaacaaaaaggtttttatccgttacgtgaagcaataagcaaatacgtaaaatcatttggaatacatgcatcaccgggttctatattaatagtctcgggtgcactccaagcattacaattaatatcaattggtcttttacatagaaaatcaactgttttacttgaacaaccttcttacttatattcacttcatgtttttcaatcagcaaatataaacttatccggtatatcaatggatcatcacggtattttacctaacgacttgttaaaacgaattaaatatagtcaaaagaataatattttatattcaatcccttgttttcaaaatccaacggggatattgatgtccaaagagcgaagaaaagaaatattaaaaatatgtaaaaaagagcagttgcctatcatcgaggatgatatttaccgagagttatggattgatgaatcacctccagctcctttaaagtcaatagataaacatggacatgtattatatattggtagtctctctaaaacacttagccctggacttagaattggatggataattggaccagaacctgttattgatagattgtcagatataaaaatgcaaacagactatggatcaagctctttatctcaaagagtagctgctgaatggataaatgaaggtttttatgaagaacatgtagcaaacgtaagaatgcacctgaaaaaacgaagacaaataatgatacgagctttaaataaatattgtgcagatattgcatcgtgggatattcctagtggtggagtttttatatggctaaaggttgtacataacattccgatgaaaaaactattttcagaggcactatcaaaaggaattcttttaaacccgggacgtatttatgaagaagaatcagatcagtacattcgtttatcatatggatatgcttctccagaacaaatgactaacggaattaaattgctcagtgaattaattcggaagttaacggcataaaaaaatcctcttttgtttttggaggattttttcacgtattttatttaccacaatttcatttcctgccctaataaaataagttcttcataaggatctccgtcaatatttaatacttgagcaaaagcaggttctgtttttaaaccttgttcctttaagtgaataacttcttcccttatatgaggatgctgcattaataacatgtgctccactatcatatgtctatatgcattttgattacgcactggcttaggttgagcaaataattcaaattcaaaaccttcgaattcaaaattcacctttatcgattcagtacctttcatttttttcttttttatgttgaaccctctataagaaccatataaagatctcatttcttgctcaaaaacatcaaagttatatacttccattacaatatctaagtcagattgaggagtatcaattcttatcgggattgtcccgcaaagaacgggattatataaagctaaatcctccataatatttagtttgttcaaaacatcatataccttttgttgcttgtcattccctgattgtaaatatgtaatagatgtaaacatggaagtctctccttcatttcacgtaatacgtgtctcactaaactcaagaaaaatttgtccgtttaaacttgttctagaagtacctttatttcaatatattaaggcgaataaacaatatgtttcaacttttctcctatactgcaatactataaaaataaaaaaaggaggaattattatgagcattttcaacgttcttttagccatccacatattatttggaacgatatgtttaatcaccggtattgtagcgatggttgctcaaaagaagaaaggaaaacatacggaatggggtgaaatatatcatgcatcctatgttgtgatcaccgttactgccattatattatccgttataaactgggataaaatcgcatatttattttatgtagcaattttctcttattcatttgcgatttatggatacctcgcacgaaaaaaacgttggaagaattggcttcaccaccatattagaggtatgttaggctcttatatcggtgctgttactgcacttttagtaaatgtcggtattcatattcccttaattaatttacttccgcctatatggttttggtttttacctacattaatcggtattcctctcgtagccagtgtatcaaaaaaatataaaaagcgtagttaaacttcattacattttcgttactttctgatgattattatgaaaaatcatactcaatgtaatattttttttataaattcaagatcgtattgctttaagttagtcacttagcgctaaataagaagaatccaataacagtattggattctttttcaaatttcatttcaatatcggctttatgcattcaatgatgttaccatttggaccaaaaaccatctttgtatacttgtgggtacttgttttattggttcagtgataattacaccattatagtttaagattgtaataacgaatgtaaacgatccgggtaattcgtaaacatcccatcaacgccccataaaagtaactttttcatatctttttcattatctacagtaaatggatgaacttctaatccgtgcttctttattctctttacataagcggaatcaatatatttatagttcatcccaagaccgatgcagtatgttttatacttttttatctctaattcagttaattgaactgactttttgtaaggtagtaattgtactagcggtaaagtaacatctaaactatgaattttttgcagactttcttcactaaatgattgaataataacgttatcacttatttcgtagtgctgtataatttctaatagcttctcttccataccagcgtattcatctggtgattttgtttcaatataatagtttgcaccattcccgaacgtttcaataatttcttctagtgttgggactttagcatcttcaaagtctttctttgctaaacttggatgcttttcattgaaaaaagaacctgcattaagtttctttatttcttctaatgtatgttccttaactagacccgtaccatttgtagtgcggtttactgtttcatcatgcatagctactaaatgtccgtcttttgtcatttgaagatcaatttctatataatctccttttaattgttgtcctaatttatacgctgctattgtatgttccggcgcatacgcagaagcgcctctatgtgcaatgttttttatatgatttgcttgattaatagctttcgtgtacttacgttcatctactttatgtaaaacgaaagtacctagtaatataatggtgcaaatgattgtaatgatatatatctttttcataatgatgtattaactcctacatgaaagcaatttggatcgaataatttattcaattaaatgtcgattttcaaatacagtcatttgtccaacagattgaaaaccagcctttttataaatattaatcccatcaggtgaagcttgtaatacgcattgagaaactttcaattgttttgcttcttgcagcaagtaattaaacatagtggagccaaatccttgccctcgcattttttctttagttgctatatcataaataccaatactatcttttgtacatactaatgaaccaacagatacgacttcatctttaaaaatccctaaatatagtttcatattttcactattccataaatcgaaagaagcagtttcattataaaatgtttgcacatgtataccttcctctgatgtaccaaatagattagctaacgtttccccaaactttttaatttgtcctaacgaagatgctctttgtatcgtaaaaccttctggcatttttattgttggttgaattgtctttaagtctgctaccatcgcaatattttgttctgcttcttttaagccaagttttattaattcgttttttatagcctgttcatagctattatcccaaaaccaaacacacattggaaacttctttttattatagttgtttatcactttatataatttctcaatgtcttccgttacatcattgtttagtaaagtaatgatattaaatgtatctgcaggtaaaccacaatctacagcaatgtagtccttcgtttcttttacattcatttcatgtacatgacgcgcaatatatgacattttatatgtgaagttatctattaataactgtttataattcattcttttttctcctttcataaaaattcgtattcaaatcgttcagtattaaatataacatatacgaaatgtaactatttctataaaaatatctctataaatcactctatacgctctgaaagaattaaaaatgatataacgttgtcggaatgaaaaaagtggtatataataaatattaacattactagtaattattttaggtattcctagaataaagacctgcggtagtatgtcaactgaaaaacaaaagaatttttagttatcaaaggcctatttactaaaaaaagacatagcccagtacaataccgggctcataccctagaggctgcctaatgaaacgacctgtctaactttcgggggtcacttcataattagtgaaacggctttttttgatgaaatctataagctgaagaatgaatatttgctgataataaagtttgttaatttttctggcttttcctcaatgtaaacacctaattgttgaaaagtgttatgtttagaattaagtcgggatttctaaaggtcacgtacattccagacaatctcaccacgttcgtcatcccacgtactgtgatgacgcttaaatcctatcttttctagtacccggagggaagcgatattccaagcacctacagtcgaccaaagtctttggcgcccagtagcaatcgccgcgtccagtacaacagatgccgcctcagtcgcataacctttaccatgagcgctgcggaacaactcgtatgcaatctccggctcttcaagtgtggaacgaccgataatcaagccgcagtatccgatgaaatcgccttcgtctcttcttcgaatagtgagaagggaaatgccattttcatctgccttcttacgcatctcaataagccggttacgaacggagtcgagggtcggcatgtccacaccacgttcgccaattaatttcctcatccaaactgaatcggattcctcccacatactcaggtcaagtcgttcggtttttagctggaactccatagttttaaataaagatggcatagtggaacctcctaattatgtcacttaactcataatagcttcgcaccgcatcatgttgaaccaatcgttgattcgcgaatttattttcctaactcccgcgagagtttatagcaacagtatacaatagtattattttatgcataagcaattcctttgcaaaatagacccttttctcaaacttttctttcattctaaagccgtcccgttaaatacacaggctcctactatttctaaatgcataaaatggtaagcgaaagtatggggggatacgatgtataattcaaattattatgattgttataggcaaaatgataagttgattagtgatattgaaaaagctataaatggagagtatagcgccataagctgctatgcaaaattagcgaatatggctccaaatcaagtagaacaaaaacaaattcttgaaattcgtaatgatgaaataaagcatttccacaactttgtacaaatttatacgaacttaactggcaggcagccgaaaccacaaattactgaagactgcccaaatacgtatttacaaggattagagttcgctatacaagatgaacaaaaaacagtagatttttatttggaaatttcagatgagacatccgatgtacatttgaaagagttgttacggagaatagctgcggatgaacaaaatcatgcagtatggtttttatattattttgtaaagtcgaagtgagcattaagaatgaacggctaatgtggtgcatatattagaaattattttaaaaggcagtgcaacaattgaatgaaatatttaaatgtaagaaaaaggaaaccgtttcgctaatagtggagcggttttttatgatgtacatatgtatcgacaaaatatagtaattacatttcatatataatgtatgaaaatgaataagttaggagcaagcatatgaaaagagggatttttgtagatattccaaatgaatacagcaatgtactttggaaagtgttaaacccaattgatattactgaatttgattggcgagtgagggatgaggagtcctacttaatagcacgtggtgaattggatgaggcattatttccagaagaaccaagtgtagtggaagggttagcattgaaaaagttagttaaagacaacatatattatcttatttttgcagatttaaaagcatatcctaaaggagaaaaaacgatagatattgaaacatatgaagagtttaaggaaagtaagtgtgagctaatcgtattagcagtggatgctcaatgcatacaaatttatgcgaaagatcaaaaagcgattgaattgatgtatgaaaacgcacggaatcaaggattttatgtagaatatattacagatgaaaatgatggaaggactcgtttgtcagtatggtagcaatttgaaaggggaaaggcaatatggagagcaatataagtaaagaatatgcaattcgaattgctactgaaaatgaaagtgatagtattatcattttattaaaagaagtagcacaatggctacaatataaagaagtggatcagtggcagtatcttttaggagaggaagctacggctgaaatactagaatgtataagagagaaatatacgtatgttgttatgaaagaagatgaaatagttggtacgattacagtttctcctaaacaaaatgaatgggatgaatacatttttggtaaagaggaagtttctaattcattatatattcatagatttgcggtgaaacgaaaatataaggggaatggaataggagagagggttttacagtggatagacgagaatgtacaatgtgataaagagtatttgaagttagattgcgttggacataatcgtacgctgaatgatttttataaaagaagtggttttgagtatgttgggagtacagatggacttagtaaatttcaaaagagaaggggcaagtgaatgaatcaaattcatactgatttagttaaaagattgataggggaacaatttcctaaatgggcacatttagaagtgaagcctgtaaagtttagtgggcatgataatagaacgtttcatctaggggatgagatgagtgtaagattgccaagtgacgcggcatatgcgccgcaagtagagaaagaaaataagtggctacctatattaagtaaggagctttctttaccgatttctgcaccaattgcgaaaggaaatccatctgaagagtatccatggccttggtctattaataagtggatagaaggagatactattacgaaacaaaatgtccgtgacctaaatgaatttgcggcggacttaggatcatttttagtggaattgcaggctattgatgcgagtaatggcccaatagctggagcgcataatttttaccgaggcgggcttatatctgtatatgctgaagaggcgagagttgctattgaaaataataaggatgtttttgacgaggcattattaaagcacctttggaatgtagcacttagttcaacatgggaccgtaagccagtttgggttcatggggatgttgcacctggaaacttacttgttaaggacggaaagctttgtgccgtaattgattttggtattttaggagtaggggatccggcttgtgatgcagcgatggcgtggacgttttttgatgaaaatagtagaaatgtatttaatgaagtattacgcatggatgaagaaacgtggaatagagcgagaggatgggcactttggaaggcgttaattacatatgatgcgaatagggatagtaatgaaaaagtagcagaagaatcgtatcgtatcattcaagtgattgtggatgattatgagaggtagtagaaaaagcctattttaaaataggctttttttatatgatgaaatagtagaaatggaaagaaggaatccaacataattatacagaatatttagataataggaggtgtcgaattttgagtgaaattgaattaaagagtaatgtaattaagacagggcaagagaagggaattattcttcggtttatacttgctagtctcgttggagtgtttatgtttttcgttcctgttacgataaacggtgcatcgtctattatgattgatcatatcgtatcgtggattagggcttcggttcctggcatagtaccttattatgcattatttgttatggcaattggtgcgatttatccattttatacgaagaaatggaatgcatctatcgtagacatttgtttttctattttaaaagtagttggcgttgtatttggcatattatattgtttaaaagtaggaccagcttggttctttgcgccagatgttggaccgtttttgtatgagaagctagtcatatcagtaagtttgctcgttccaattggctcggcgtttttagcgttattagtcggatatggattgcttgaatttatcggtacattttgtcgtccgattatgaggccattatggaatacgccggggagatcggcaatcgacgcagttgcgtccttcgttggaagttattcgcttgctctccttattacgaatcgcgtgtataaagaaggaaagtatacgacaaaagaagcggcgattatcgctacaggattttctacagtatccgctacatttatgatcatcatcgcaaaaacattagatattatgcatttatggaatgtttatttttggactacgcttgttgtaacattcatcgtgactgctatcaccgtaagaatcccgcccctcagtagaaaaccagatacatatgtaacagaagaagggttcccagagcctgtttataaagaaaaaatgttagaacgtgcttgggaagatgcgttagaagtatcaaagtctgcaccgagcattatgaaaaatattgcattaaatttaaaagacggatttattatgacgatgggaattttaccatccattatgtcagtaggattaattggtatcgtcttagcgaagtttacgccaatatttgattggatcagttatattttctatccgtttacatggctattacaattaccagaagcagacttagccgctaaagccgcatcagttggtattgcagaaatgtttttaccgtcattattagtagtaagtgcaccaattgtgacaaagtttgttattgcagttgtttccgtatcatctattttgtttttctccgcttccattccttgtatattatcaacagatattccgttaaaagtatctgaacttattattttatatgtgcagagaacgattttaacgttacttattattacgccgattgcttatttattgctttaaagttttaataagataaagttataaaaaagaagccgtctgtaaaaagagggcttcttttgtttaaaagcaggatattcttatttatttttcgtatatgacgtaacgcttcttaagaagattcctagtcccgcaaaaaagaaccctaagcataataagctgcctggcgttccccaagtaatttgatctagcattttttatcccctcccgtttatcattatatagaatttattgggaattaccaaaaaattcttttttaagggttactgatgagtcttcctaccttccttatacgagaagaatatatttgaaaagaattctttgctttatatttttatattattataatacgtttttattcttatgatatagtaacaacaaagggggcttaaaaatggaaattattcacgaaagagcaaagttgcggttaatggataatactgatgtcgaaactttgttttcgattgtagaaggaaatcgggatatttgggcgtatttaatctctaaaatggatagtgtgcaagatatgcaacaatacgttcaaaaagcgataaagggttacggaagaggtactcaaatacctttcatagtcgtagatcaacagtcgaataagattgtaggaagtacacgtttatataatatttcagtagaagataagacagttgagttagggcaaacgtggtatcatccgagtgtacaacgtacgagtataaatacagagtgtaagtatatgcttctccagtatgcttttgaaaaattgcatatgctgagagtgcaaattaagacggatgcaagaaatgaaaaagcacaacgagcaattgaaagattaggcgcagtaaaagaaggtgtgcttagaaatgaaagaaaattaccgaatggttatgtgagagatgcggtggtgtacagtattatctcgagtgaatggccaggcgtaaaagaacaattgttagaaaaattagagttatataaagaaaagttataattcgtgttttgaaaggtatattgttcgtgagacatgaaaaatataccttttttcttacaaaatgctactttattttaattccttttgtttcatcgttcccttctgagaaaaaattcgttacaatgtagttgtatggtaataaacttatgaatttaaaaaatgtaatgaaaaccgcaaatgaaaatgaattgataatcctcaattttaaatgaaaacccttttatacataaataacaagtaaagttccttcttttaaataaactcaaacaaaacgatttgatataaatgttttttatagaagtatggatgatgtacggaggcaattacaaatgaaagaaaataagaagagtaagaaaagacgaatctttcaagtatttttactaatgatttgttctgctattttatatgtaagttatgcagcttacgatatttggagttatcgttttaaagcaaatgatgacgtgaaaacggatgctggtatcgtactaggagcagcttcgtggaacggaaaaccatctcctgtatttaaagaaagaattaatcatgcgatttctttatataagaatggaaatatcaaaaagattatttttacaggtggtacaaagttcgaggcagaacttgaggaagcacgtactgcaagagtatatgcaatgaaacaaggtgtaaaagaggaagatattttaattgaaactaaatcccttttcactgaagaaaatttaaaaaatgcgaagcaagttggaatagagaacggaatacgcacatacacgattgtaagtgatccacttcatatgaaacgcgcaatgagaattgcaaaacatattaatattgaagcgtatgcttcaccaacgccgacatcagcatataaaacgttagacacagaaattccattcttctttaaagaattattctcgtatattggatatgtaacctctttgccattaaaggcattgaaaggagattaacataagaaaagaacctatccttaaataggaacttttcttattagtcaaaaacattgtatttttatcggaatagtgaaacaatagagaggtagcttcatataatcataatgaaaaagtgagcggttgatgaatcgaacataaaggagattatagtatggcactctcatttgttgaaacagaagaacaatctttcattattgcacaaataaataaattgattccgaagttcatggaaagggagcatcagctaagtgaattgggatcatttccgtatgaaaatataaatgatttgaaagatatcggatatacgaaattaacgttaccgaaggaatttggtggtagtgcgatttctttatatgactttgttttatttcaagagaaaatcgcggaaggctgcggagctactgcattatcgattggctggcatcttggcattgtgaaagagctagcggaaaatcgctcttggaatgatgagatgttcaaatggttttgcgaagaagtacgtaatggtgcgctctttaacagggcagcgacagaaccgaaaacagggagtccgacgcgtggcggcaaaccagaaacaatagcggttcaacaaggcgagaagtgggttataaatggaagaaaaacttttacaacgatggcaccagtacttgattattttattatttcagcaagtatggaaggccaagaagaagttggtgagtttgttattccaagaaatacacccggtgtatctattgaagaaacgtgggatagcgttgcaatgcgagggactgctagccacgaccttgtcttacaaaatgtagagatagaaagtcgcttttttacagatataaaaggcgggaaagtaaaacaaaagggtgttggctggttgctacatataccagcatgttatttaggaattgcacaatcagcaagaaattatgcagttcaatttgcggaatcatacaagccaaacagtttaaaccattctattagtttattgccgaatgttagaagattagttggagaattagaactcgagcttatgcaagctcgcgtctttttatatcaaattgcgaaaaagtacgatgaggcagaagataaactatcactgcaagcagaattagcagccgtgaaatatgctgtaacaaatgcggcgatatctatagtggataaatcgatgcgcatcgtaggagcaaaaagtttatcagaaaaaaatccgctccatcgttactatttaaacgtcagagcaggactgcataatccaccgatggatgatgcaacattgtctatgctggcggatgcggcgtttcggtcgtagtttttaaattttacattttattgtttatggatattatagttgttttgaaagcacgggtttgattagtaatcaaacccgtgctttttatgtgtatgaagtacttagttgagatgtaggtttttaatataaatgattatcatggttttgtgattgtttcttgttgaaaaattcttattgtaatgccagtttggaggctgtataaacatttttcgtatttaatcccaaattaatggtctttctaagtttaccattcgtaaatattgtaaaaattgacctgcatggaccgcatcatgataggcaattcgtaatagcatatcgcctaaatatcgttgatagccaacatcgcttctatcaataagtcttgaatctagatcggctatgcttattgattgaacatattctatgaagtcagtaaagtatgattgtgccaattcaatttctttttttacacaagtaatcggctcgtcatcatacgggatacgtatgtcgtttattgaaccgttgttttttataatcatatggtagtaaaaagttgaactccatacatgacgaatcatctcaccaaaagacatagcctcaggatcaggcttccaattaagaaaattattaggaagagaattccataatttttctgagcgccttctcgtttctttcaaatttaatatactaagatcaattgcattcataatacattctcctttactattaaacttaaaataattgtatcaatttaatagttagggtatcatcgaaatatgaatgtatatccgaatatctcatatatagctaaactaattgctgaacctacaagagcaatcatattagattgtctaatgaataatcaggcactacctgctagtgaattggcttatatggcaaaagtgtcacatccaacaattagttcgcatctttctaaattagtagaagggaatttacttacagttgaacaacatggtagacatcgttactatcgacttgctaatcaagaagttgcagaagtgcttgaaaagttagggacaatcgcaccaacagttcaagttcgttctttaaaacaatcaggtcaactaaaacaaattcgttatgctcgaacttgttatgatcatcttgcaggcaaactcggtgtagagataactgaaaaattactagataggcaatttataattttagaggatggagaatacattgtaacggaacaaggtaagcaatggtttctgaattttgaaataaatgttgatgaggcagatacaaaaaggagggtatttgcaaaaccttgccttgattggagtgaacgacgctaccatattgccggttggttaggatctgcaatagcaaaactattttttgaacaggaatggattacaaaaacggataagaatcgggctgtccatcttacaaagaaaggtgtaaagttattggaagatcaattaggcattgatatgaaaactgaggaaaggaaagcttgaaattagaaaagtccgtcaaaatgacgggttttttcattatggtaggagtgtacatgaataataggatgttaccaataattgttgccaataaaaaaatctttcttttcattcttcttttttaagttttaaaggagaaagctaggcttcttatttttactaatgttataataagaaaaaagcacgaaaagaggtcatctcatgctagaggttattgcaacatgtttagaagatgtaaaacgaattgaaagcgctggcgggaagcggattgaattaatttcatcttatacagaaggtggtttaacaccgagttatgcttttataaaaaaagcggtagaagcggtaagtataccaattcatgttatgattcgtccgcatgcgaagtcttttacatatacggaagaagaaattgaaatgatgaaagaagatattatagttgcacagaagttaggagcagctggtgtagtattaggcgtattaaatgaacgaaatgaagtggatgaagagaaattagcggacttactatctgttgtagatggaataaatgtaacgtaccaccgtgcgatagatgatatagaaaatccagtagaagcgatgagaactttaaagaagtttcataaagtgactcacgttttaacttcaggtggacaaggaaatatagtagagaatattccggtgcttacagaaatgcaaaaggtaagcgatggtcaaattcagcttgtagctggagctggcgtgacgaaagaaaatataaagcgattgctagatgaaactggaattacgcaggcgcacgtcggtacagcggtaagagaaggaaaatcatgtttttctgaaatagatcctaatttagtacaagaattagttgaaataataaaataagtgcttaagaaagaggagaaacgatgaaggaaaatacgaagaaagaattattctcatgggctaaaacgatagggtttacccttgtattaattgctattattcgcggtgttttatttacaccttctttagtacaaggtgaatcgatgatgcccactttagaaaataacgaacgagttctcgtgaataagattggttatagtataagtggattagatcgctttgatattatcgtcttccacggaaaagaaggttacgatttagtaaaacgagtaattggtttgccaggcgatacagttgagtataaaaatgatgttttatatgtaaacggaaaagcgatggaagaaccatatttaaaacagtttaaagaaaaagcagtaggccgtgtattaactccagactttacgttagaacaaatcacagggaaaacgaaagtgccagaaggccaagtatttgttttaggggataatcgtgaagtttctaaggatggtcgcatgtttggctttatttcagaagatgaaattgttggaaaaggacaagctgttttctggccgttgaaacaagtaagagcgttataaagtgtagtgaagtatgggagagatattcttccatgcttttttatttgcttaaaatctattgattgaattgaaagaatattttataattttaaattatatgtttgtttcgaaaaacggaatttaagttccgtttttcggaacgaaagggagatagaatgagtataaataaaacggcagttaagacaatggatattttagagttgttttatgagcatgaagagctaagtttaactgagatggttcagcttacaaatatgccgaaaacatctgtttatcgtttaattggctcgttagaagagatggcgtttttacaaaaaaacgaaaaggggaaatatcgtttaggggtcgtatttttacggttcggtcaacttgtttcacaccgattatcagtaagaaatatagcaattccttatatgaaagaacttagagatagtttaggacaggcagttaatttaataattcaagatggtaatgacgcaatttatgttgaaaagatggaaggtgttcagccagtacgcgtgtatacggcagttggaagaagagcaccgctttatgctggtgcatgtccaagaattttactatcgtatttctctgaggaagagaaacggagatacatagaggaagtggatttaaaacagtttgcagatggaacaatcgtggataaggaacaattgttagaagtgttgcaaatggcaaaaaaggaaggctacacaattagttattctgagttagaaaatcatacagccgcgatagcagcacccattttcgcgagcgatggaacggttgtagcaggcattagtatttcaggattagcaattgagtacagcgaaagtaacatttcatattttattgcgaaggtgaaagaaacagcgcatcgcatttcgaaagaactcggctttttggcatagaaagagggagtaggatgaaattttctgcgttaggggatcaagcaattattgttacatttggtgaagaaattaagatggatatatatgagaaagtacagcggttatttcaagcactgcagcaacatccgtttgcaggaatgattgagtgtgttccatcgtttacttcattagctgtttactacaatgtatacgaagtatggaagagaaatgagagaagtgaaaggtcatatgattacgttcgccagtatataaaggaactgtgtgattcttataaagaagaagtaaaacaggatgtgaaacatatttctataccagtgtgctacggggaagaatatggacctgatttagaagaggtcgcgcattatcacggtttacaagtagaagatgtgattcgaatacatagtgaaactacatattttgtatatatgcttggttttacaccagggttcccgtatttaggaggattatcaaaagaattaggaacacctagaaaagaaacaccacggttacaaatctctcctggttcagtaggtattgggggaaatcaaacaggtatatatccgcttgaaacaccgggaggatggaatattatcggccgaactcctatttcattatttaatccggaagaagaaataccaacatatattcaaagtggtatgtatttacgatttattccaataacgaaggaagagtacgtatcacttgagggggttaaagaatggatgtagaagttttgcatgcgggaatgtttacaacagtccaagatttagggcgatctcattatcaacaatacggtgtgccagttggcggggcgatggatcaaagtgcacttcggatgatcaatatgttagttggtaatgaagagaatgaagcgggactcgaaatgacgattatgggacctaaattgttaataaagaaaacgactttacttgcgattggcggagcagacatggaaccgttgttaaatggagaacgtatcccattatggcgtcccattttagcggaagaaggtagtatgctttgttttggaaaagtgaaaagtggttgtagagcgtatgtgacttttgcgggtggtatacatattgagcgtacaatgggaagcaaaagtacgtacatacgtgctgcgattggtggtatagaaggaagaatgctgaaaaaaggagattgttttcaaattggtacgtactcagaaatggcgaatcgtttcattcaagacttacaaaaagatgagcgaataaaaacgaaatgggtaattagcaacagcgtactaccaaagtataagaaacatcctaagcttcgtgtcatagctgactttgaatacgatcaatttacagaagaaagtagaaaggcattttttacgaaagagtataaggtatctaattatgctgaccgtatgggctatagggttgagggagaagttttaaataggattcaagaaaaagagattttatcgagtcctgttacatttggaaccattcaagttcctaatggcggacagccgattatattaatggcagataggcaaacgacaggtggctatccgagaatgggagatatcatttcagtagatttacctcttcttgcccagctaaagccgggggactatgtttcttttgagaaaattacgcttgaagaagcggaacaattgtacatagaacaagaagtaaatatgaatctattaaagaaattcatcgctttacgaagctggaattaggaggaatacattgtgactacaatcgatttaaactgtgatttaggagaaagttttggagtttataaaatggggaatgatgatgaaattcttccgttcgtttcctctataaacgttgcttgcggttttcatgcgggtgatccgtctattatgcgtcaaactgttgaaaaagctttggagtataacgtagcaataggggcgcatcctggatttcctgatttaattggatttggtagaagaaacatgaatgtttcagcaagtgaagtatacgattatgttttatatcaaatcggcgcattagacgggtttgtaaaagtggctggcgggaagatgcatcatgtaaagccgcacggtgccttatataatatggcggcgtctaatccggaaattgcagatgcaatcgcaaaggcaatttatcatataaatccaagtctattactttacggattagcaaatagcgaggcgtttatacaggctgcagaaaaatacaatgtaactctcgtacaagaggcttttgcggatcgtacgtataagcaagatggtacattaacgagccgtacagaagaaaatgcgcttataaaagatgaagacgaagcgataaagcaagtacttcaaatggtgaaagaaggccatgtaaattcgatcaatggagagaaagtagcagttcaggcgcaaacgatttgtttacacggtgatggggaaaaagcagtgcaatttgcagaaagaatatacagaacattcggacatgatggtatttctatatgtgcaccgaaataaaaaatgaggggaagtgttggaattggtgaaattaatcgggatattattagtggcagtgggctttttatttagattaaatacacttttagtagttatggttgcaggtattgttactggtatggtttcaggattaagtttttatgatgtgatcagcatgttcggtaaatttttcatagaaaatagatatatgtctatgccaattatattaactttaccggtaatcggaattttagagcgttacggtttaaaagaaagagccgaagcacttataacgaaatcaaaaggagcaacaactggaagagtattaatgtcatattttacgataagagaatcatcagcagcactagggcttaatattggtgggcatgcgcaaacagtaaggccgctcgttgcaccgatggcagaaggggctgcgcaaggtaaatacggtaaacttcctgaaaaattaagagaaaagattaaagcaaacgcagctgctgcggaaaatacagcttggtttttcggagaagatattttcatcgcaactggtgctattttattaatgaaaggattcttcgattcagtaggtatgcatgtcggtgtatgggatatggcactttggggcattccgacagcaatatctgcacttattgtaagctggattagatttagaaggtttgataaatatatagagaaaacaatgaaggcagaaggaaaagaagagaaggaggcaatctaatatgaacatcatcacaatggatacaatctattatgtattagggataattgttgcttttatcgctgttcgtatcgcattcgatcgtgaacatccaaacagattcggttctagtttattttgggcattgtttgcagttacatttttatttggaaatgtaattccttcgttttacgttggctgtatcgtgctcgctatggtcgttttagcctcgctaaataaagtgacaaaatcagaggaaaaagaagttccagtacaagaacgtgtaaaacatgctgagaaattaaaaaataaaatttttatgcctgcactattaattcctatttttacaattatcggtacgttgacgttagggaaaattaaatggggaaatgtctctcttgttgatccagataaagtaactttagttgcattagcgcttggtgcattactcgcatttgtcgcggcgatgcgtattacaaaatcgaaaataacaacgcctgttcaagaaggaagcagactattacaagctgtcggctgggctgttattttaccacaaatgttagcggcacttggcggtattttcgcgaagtcgggcgttggacaagtcgtttctgatttagtcggacaagtgttaccgacagagtatccgttcgttgctgttatggcgtactgtttaggcatgatgctatttacagtcgtaatgggaaatgcattcgcagcgtttgctgttattactggcggaattggcttacctttaatagttcaaatgcacggcggaaacccagcaattatggcagcactcggtatgtttgctggatattgcggaacactgcttacgccaatggcagcaaactttaatatcgtacctgcgatgcttttagagctaaaggataaaaatgcggttattaaagcgcaagtaccaattgctctttcaatttttatcataaatatgtttattatgtacggccttgtatatcgtttttaattaggaggataaaactatgaaaacagtattattaacagggtttgatccgtttggcggagaaaatatcaatccagcttgggaagtagcaaaaggtttgcatgaaaaaacaattggagaatacaagataataagcaaacaaataccaactgtatttcataaatcaataagcgtattaaaagagtatatagaagaactagggccggaaattactatatgtatcggacaagctgggggcagaccagatattacgatagaacgtgtcgcaattaatattgatgatgcaagaattgctgataatgaagggaatcagccagtagatgtaccggttgtagaagaaggagcgattgcgtattggtctacacttccgatgaaagcaatcgtaaaaaaacttcgcgaagagggcataccgtcatctgtttcacagacggcaggcacattcgtttgtaatcacttattctatggacttatgcatgaattagagaaacatgataagaaaataaaaggcggattcattcatattccgtttttaccagaacaagcgagtaattatccagggcaaccgagtatgtcactttctactattagtaagggaatagaattggcaattgaagtaacgatgacagttgaagtagatattgtagagattgggggcgcaacgcattaagtaaaatgaattgtacaacacctcctgtaaacaactggtataataagaataggaaaatacatagaggtgatttttgtgcaacaatttgaagaagtacgtttaattttagaaaaagcgaagaaaattacagtattaacaggcgctggtgcaagtacggaaagtggtatcccagatttccgttcagcaaatggattgtatgctgatgcgaatgtggagatgtatttatcaagagggtactataaccgaagtccgaaagaattttggaagcattataaagaaatctttcaaattaatacgttccatcaatataaaccaaatcgtggacatcgttttttagctgagctagaagaacaagggaaagatattacgattttaacgcaaaatattgacggtttacatcaattaggtggcagtaaacatgtcattgatttacatggaacacttcaaacagcacattgtccgaagtgtaaagcgggatatgatttacagtatatgattgatcatgaagtgccgcgctgtgagaagtgtaatttcattttaaatccagacgttgttttatacggagatacactgcctcaatatcaaaatgcgatgaaacgtttatatgaaacagatgtacttctcgttatgggaacgtcattaaaagtacaacctgtcgcttcattcccggaaatcgcaaagagagaagtaggggcaacaactattttagtaaatgaagagttaacaggacaagaatataactttgactttgtttttcaaaataagattggtgagtttgttgaagggttatcttcaatgaaataagttaacgaaaaaactgaggtatctacctcagttttttatttgggtaatcgctgtattaagcaacatgaaaacaggtcgataatgtagtaatcacatctctataatttataaaaaaggttttagtcggcaaaatagcagaataggaagaaatgttttctttaaccaataaacaatcgtcataaagtaagctaatatgtagctgttgtaaaggttctatttcgttttgctttaagtataaaactaaatcgttaaaaagttgttgcccatattcatctacagaacgttctaatgaaagttgacctactatgctagtccaccatacttgaaaactacatactaattctttaaaagagtcttcattacataattgggtgttaaaaagcttctcatagaagatatggttttcttcatgaaaaatttgtaaatcatatctgtcgttagcagtttgcttacgaagagtcagccataattctttgaaatttattttaaagtcagtggagaaatgtaatgtttttgttatgtaaggaaaacgaaaattttctttttttcctttttgattgagataaatattttgaatgtagatcataaagtttaaacaatgtggcgttttagtatgtatgataaacgaatctgtcattttcgttctctccttaagtaatgtcttttatgaatttatttctttagtatacaaagaaatgtaaactaatggtataaaaataaatttgctccatttttcttttagaataatattcattttattgtgcattaagggaatggtaataaatagggtataaaaataaaaaactgaaaattaaatcttttatttcttttataattaatataaaattctatatatatcatataaataaatttgatacataatgactttgcgtagaaatgttaatagaatgaagcgagggagcgaaatgagacagaaaaaggagcagaaaaaactatcgaaaaagaaaaagactcatattccatttcggttaaatgtactattttttattgtctttcttttattttcagctattataattcaattaggtaaagtacaaatcattgatggagaaacgtatagaaatgaagtaaataaaaaggaagatgtaacggtaagcactcccgttcctagagggaaaatgtttgatcggcaaggtcacgttattgtaaataataaaccattgcgaaccgttacatatacgaaaatgagaggagtagactcgaaagaagttttacaagtagcaagaggtttagctaagctaattgaaatgtcgcaagaggacatagacaagttaacagaaacagataaaaaggatttttggatgcagttaaatgaaaagcgggcagcagcgaaagtaacgaaagaagatgagagtaaatttagaaagcaggagatagaagggaaagaattagataaaaaagttgaagagttacgtagggaaagaattacacaagaagaattaagtgaactttcaaaagaagacctagaagtactagccattaaaagcaaaatgaatgcgggatataaaatgacgccgcaaatcgttaaaaaagatgtaagtcaaaatgaatatgctgtcgttagtgaaaggttggcaagtttaccgggggtagatacaacagtagattgggaacgtgaatacccaaatgataaaatactgcgctctatactaggtagcgtttctaatgaaaatgaagggttgccaagagaacaattagattattatttagttcgtgattataatcgaaacgaccgtattggtaaaagttacatcgaaaaacaatacgaagatgcactacacggaacgaaagaacagtctaaaaatattatggataaagcagggaagattgttcgcacagaaaaagtgactgaaggaaaaagtggaaataacttgatgttaacagtcgatatggatttacagaaaagagtagagggaagtcttgaaaagaatttacgagcctttcatgctgcagagccgatgatggatcgtgcgttcgtagtaatgatgaatccgaaaaacggtcaaattttatcaatggcaggaaagaaaattgtaaataaagatggcggtatgcaaatagaagattatgcattaggaacgatgacaagttcttatgagttagggtcaactgtaaaaggtgctactttattaactggatatcaaacagaagcgattaagccgtatacacatttctttgatgcaccaatgtattttaaaggaagttctaagccgaagaaatcgtggaaagaatttggggatattgatgatttaagagctttgcaagtgtcatcgaacgtttatatgtttaatacggctttaaaaatggcaggcattaattatgtcccaaacaatccattagatattaaacaagaaacatttaataaaatgcgctactattttagacaatttggcctaggtgtgtcgactggtattgacctgccaaatgaatcaattggtcaagtaggtagaactgataacatacccggatttttacttgattacgcgattggacagtatgatacatatacgccgcttcagcttgcacaatatatttcaaccattgcaaatggcggttaccgaatgaagccacaaattgtacaagaagttagagagcaaccgaatagaccagaggatgtaggaaaagtcgttcggtcgattgaaccagttgtattaaatagagtggatatggacacttcgtacattaatcatgtaaaagaaggatttagaagagtttttcaagaagctgacggaacaggtaccggaacgtttaaaggtctaccatataaaccagcgggaaaaacaggaacagctgagacagtatatggtggagaaagtgatattggaagagatgagaacaacaaccgaaaaaaatgttataatttaactcttgccggttatgcaccatatgatgctgatccggaagtagctttttcagttgttgtaccatgggtgaatgatgataaatcaggaattaattctgcgattggtaaagagattttggatgcgtattttgaattaaaaacaaatagatcaaatacaaattcaattccagtagaacaaccgaacaaggcacagtaaaaatagtatcactgcatggaaacatattgtgcagtgatatattttttgagttaaaaagcgctttataaggtgggaatggatatgaaaaaggagattaagagaggctggggaaagtacatactatttatattggtgatagtcataggctaccattcttttactttatgtaaggtggaaggggaatcgatgcagccgactttatatgaagaagactacgtatttgtaaataaagcagtagtacgtctttctaatttacaacacggagaaattgtcattataaaggaagcggatgaatcgaaatattatgtgaaacgtgtaatagggcttcctggtgatgtaattaacataacgaacggaaaggtatatgtgaacgataaaaagcaagaagaaccatatacaaacaaagatttatttaacaacacacaagtgttttataactttcaaaagacaaaaattccgccaaataagttatttgtaatgggagataaccgcgaagtaagtagagatagtcgaaatggcttaggatatattgaagaagataacataattggcaaggtggaatttgtatattatcctttttcaaaaatgaaaataatagaataagtgggagaggagcaaaaccccacttattaaagtttcactttattttctttaaaaaaccttttggattaaatgatatgaaaaatttatgtttagactcgtcgatacttgaaaataagccaaataactcatgtggaaaatgaaaggaaatgatcgtatgtacaaatacacaatttgctttattagaaaaagcgataaaatactgctattaaatagaaataaaaagccgaatatggggatgtggaatggtgttggaggaaaaatagaagataatgaaacgccatacgaaggaataattagagaaacatttgaggaaacgggcatagaactttcaagtgtaacgtataaagggactgttggttttaaaggtaaagatgagccccaggctagtgaaggaatgtatgtgttcgttgctgatttgccagatggaatgcaaatgaatacaccattacgtacggctgaaggtctattagaatggaaagaaattgattggatattagatggtgataatagaggagtagttagcaatttaccaaaatacttaccgacagtattaacagaagaaaataagttagaacatatgtttacgtatgataaccggaatattattcattacacaactgcatgtttgacagaagatgatgcgaacaagcgatatgaaaaacaactcatttctcaatagaagaggaaagtgaaaaatcacgtttttgctctcatcatatatgcgaggtgattatatgtttcagaaatacaattcattggtcataattgtaatatgcatgatataacttttcttattatgaaagagtagagaacatatgtaaacggagcaaaaaggaggtggctttgccacctctttttgttagctacaaatcgccttaatcataaaacgatgttgcttcacatcaaaataacctttttgtaagatgatttcatgtatacgatataattcctcacaatacctttcaacagtaaaatcaggaatttgccacggaatcgcttttaaataatagacgatagcgccaatgtcataaaagcgttggaaagggaattcctcttttgcatctaagatagtaaatccattttgctttaactcactgcatgcggtttcgagagaccaacttgcaaattcgctatttagtggtgagccaaactgctcattaagttccgcgcaatcaagaccgccaacttgttgtgtaagaaaaacgccacttggagaaagaattctgtttacctcagaagcagcatacgattcatgttgatttataattaaattaaattgaccatcttgaaatggcaaagcagtatcatcggtcacttctacaacggcaacccctaaaggctctaatttctttcgagcaattggcacatttggagcgtagccctcagtagcgaatatagttgacgggaacggttgtaacatagataaaaactctccgccgccagtacccatatcgagcattgattctgcacgttgcataagctgaaaagcagtactgccgtacgaccacgataaaggctcgctcttcattcgacccgtttctgaaatgaaagaaaaatcccaaccgctaaaatgtgtatttgcactttctaataaagttaaaaataatggatcacgtttcataattatgtcctcctatttttttaatggatgatatgatgagaaaagaaaaagggaggacctcttattaaagtggaacggttttatgtttcgtgttcgaatagattcatataaagttactccttgtgagaattgttatttatatattcgggttaattgagtgaaaatcctttgagggtataaaagaaggcagttgtttaatgaaaaagtaaattgagttatctacttttatagtgtaattgttcattcatacgcataaaaaaattattctctccataaaatagtaaaattatattggaggttgaattatgaaaaaatttagtgtattttcaataaccttgatgacttttggaatgttattatttggattaaataggataatagatagctattctgagcctattatcctattagggtatatttcttttttaattggagtggttctgagtattatagcgattgctagacgtgaagatggaagattaaaattcatatcacttatctctttctttgttgtcctgtttttcattacttggtttgagtcgtttcaggtactacgaattattacttggctaaaaaatatctattaaaatttaaattgttggtaaaaatgggaaaccttaaatttaggtttctttttattatattcgattatcaatattaaaacttattagagccattaataaaagaaatagatatatataccgagtgtaaaaatattttaattctttgaaaacattcagcgatttagtattctttatatatggaatattttgtttatgcgaaaagagggcaaggtgctatatgaaaagaatgaaaaatgtaatgttactattgttatgtttcttatgtttaagtgggtgtaattataaagatgacgatcaggtgaaaaaatatgtgaaaaaaaagcacggaattgatgtgattgtaacacattggggtgctataaacgaaggaaatatggggcatacatatcatactgttcaagcaaaaaataacaaaaatattcaatttagagtagaggtagatggcttcttatattcaagaataaaaggtgatgaatatcaatacggaaaaaaaacatatgaggaatataagaaatttaaaccaatgctagaagaaattaaaaaattaggttacgtggaacctgaaaataaaaatgtttttcaatatatagtggatgatgatatagaggagaaaccaacggataagttattattaactttaaaaacgagtgacaagattgattacagtcaatttgaatcaaaagaattagatcgtttatatgctctaatccaattcattcagaagagtaatagaaagataacaacacttgaaattgaggattataatggtgaatctataggcttgccttttcaaaatgtgcaaaaagctataacgaaagaagaactgcttttaacaatgaaaaacacagtaagcagttattggacatatttggttcaaactgaaacaaaagtaggcgtaaggttaaatgaaattcaaaatgatcgttttgaaattgaggatattacttgtccacacccgaaagacggcaattgtctagagtatgaattgacattagttttcaatgacagtgagataaaatatagaaatgatccatatgtaatagatgatttgagaaaggtagtcactattcttaaagaagaactatataataaggattttaacatatatttaaggaacaaggatggaacaagttattcactctggctatcatccgaaaaaattaaggaaagtaataacatagaagagttagtaaaataatgatataaagaagaaatttaaagtgctttttatgtttgttatttctgtattcaaaaggaaaaccgcttatgtttcatttttgaagcataagcggttttgtttaaaatactcaaaaacaaaaatcttttggtaaagtaccactttttattattgttcttaacccatgttttataatccaaggtttaataggatgctgtttatcacgtaattgctgtaaccactgaaaaacgagttctttatcttctttcgtaatatcgttcatatgattggctacagatttttgaacatatttagaagggtcattcattaaaggttcaagaagctgtaaattgttcttaaagtcaccttttagagctccaatttttttagcccaaggaagccttggtcttgtaccttcagaaactaatcttctaatgtggctgttttcgtcatgaatccactgttgcaatatgtctagtgtgtcttcatggtatgtttgaagaaaaggccgaatggcatattcagcagtattccttttcgttatttcatacatgtaaatgtgcctacttctgttgtattttctggtcctaatgttttcagcaatatatgtatggctgcattaaaatctttttgtaaagcattgtgtaattcatctgcaattacttcaatacgatgctttaactctaaattttcaactttacatgttacggaagatacaaagtttcttttagagaaagtaggatcgtgtttacaaatagaatcagccattttttctgctaattcttcgttaaataaaaattttaacggaacatatttacccattttttcacctcagtggtcaaatgaaaacaatttttattttttaatcgacaatccataaactaaagtctcactcggagtcgtaatactaaaacctgtcgtcttataatcaagtttcaccgtatcaccagtgtagtctttcgtgaatgaatccatttgtacgataagatctgcatcttcatatacaacatcatctgcgttatatgtatcccaaattaaatcgacatcaacgaaaatactacaagagtttgtcattgtccctctaatgcgaatgatctttttgtctttacgttctaatctatgtatagctgcttttgcttcatcagtaatgcgaatgttcattgtatcccaacctttaattatatttcttctattatggcaaaaacaggagcaatagggaagcaaagaggtttgcaacaaaaaacgagcaaacaaatttgtttgctcgtttcactttattttagttcacatttatcaagtggaatcacttttgtttttttcgtaaatttatatcctaaccatagtactaagaagagtggtaaaccgatgtaagaaacgagtacgccgttccaatcgattgattcacccataaatgcgccgtagttttgtcctaaaattacgatgatacaaagtgtaaatgcgaagattggaccgaatgggaaccattttgctctatatggtaagtcttttaaatctttgccttgtacggtatatgctttacggaaacggtaatgactaattgctattccaacccatgcgataaagccagacattccagatgcgtttaataaccaaatgtatacaacaccgtcaccgaataaagaagcaatgaaagcgatactaccgacaattgacgttacgattaatgcgtttacaggtacaccgcggctatctaatttgcctaagaattttggtgcttttccttggcgagctaaatcccaaagcatacgagttgatgcgtacataccagagttaccagcagatagtactgccgttaaaataacagcgttcataacagaggcagcaaaggcaacgcccgctttttcgaaaataagtgtaaatggacttactgttacatcacttgcagcaagactttcagttgtataaggaattaataaaccgataacgagaatcgcaaggatatagaataaaagaatacgccaaaagattgaacgaattgcttttgggatattacgttctggatcagatgtttcaccagcagctactcctaataattcagttccttggaaggagaaaccagctgccataaatacaccgataattgccatgataccgccgttaaatggtgcatctgcaacagtgaagtttttgaatccaacagtttcgccccccataattccgaaaatcatcataaagccgacaattaaaaagataataattgtaactactttaataagtgcgaaccaatattcagattcaccaaatcctttaacagataaatagtttaaaaggaaaataatagctaaacataatccgctccaaataagagaaggggtatctgggaaccaaaatttcataattaatgttacggctgcaagttcagcagcgatcgtaatcgcccagttataccaatagttccatccaagtgcaaagccaagtgatggatcaacaaattttgttgcatacgtactaaaagatccagtaacaggcatgtaagctgcgagttcagctaagcttgtcattaagaagtaaaccataattccaattgcggcgtatgcaattaatgcgccgccaggaccagctgaatggatgacaccaccgctggcaagaaatagtccggtaccaattgtaccgccgagagaaatcatcgtaaggtgacgcgattttaatccgcgttttaattcaccttgtccttgtgtagtttgcgttttagaggtagattgatttgttgcgctattcatgttcaacactccttttcttgtaggttaggaaggagcgggggagaaaaatacaaaaaaccgccaaaggaatttggcggaacgtttcacaaataaccaccccatcatacccttccgttaagatagcaccccacgtttacacggtaattttgtaaacgtgacagttctgttcctttcggagacagccccagctcatatttccagagaagaaatataaacttcggcaacttttcctttcaaacggagtcggtgacattctctgtgtctcgtccgttttactattaaaagtcgcaacctctacctcatcggattgatgaggatttatatattgctaagatttttaatatatggcaattgtaatgactttctgaatatattgcaagatattttgttaggaaaagtcaaaaaatatcggttattgtataggaaacgcttgcaaaactccacccgaacctactattatgtagcaataagcaaagaaaaaattgttatacaaatgtttcgcaaaaaatattgaaaaaccctctaaataaaaagaaaattcagaaaaatataattcgacattcatgataaagtcatattatttgttataatcagagtaacgtttaagcaaaaaggggaaatcaaaatgaaattagaaacagaaaggctctatatagtgccgtgtacagaagagagtattcaagtcgctaacgagcaaggatataatagcggtccgcatattgtagggcatgtagagaatgtaaaacaagatgcggctttattaccatggggggcgtggtatgttcttcggaaagaagatgatagcgttttaggtgatattgggtttaaagggaaaccaaacgagaatcaaacagtagaaataggctatggatttattgagaaatattggaatcagggctatgcaacagaagctgtaagagaactaatcgattgggctttcaaaacaggagaggtagaaacaataattgcggagacactcctagataactatagttcgatgcgtgttttagaaaagttacatatgaagagagtaaatgctacagaaacgatgattaattggaaaatagaaaaataaaaaataccgctctaaattgagcggtattttttatagttatggtagcatttgcttctgatcattcggatactcagccgttgatgcgttaggacgattggaatgatttcgaacagcaatgaaaatagaaataataacgacaagaccaactgcaacgtaagaaagtgaaataatagttggatccactttaaatgtagaaagcagtgtacgaatatttgtgaagataataagaccaccaactaatatgccaagtaaatggggcggaacgatgcggactaaccatgcagcaattggagctgcgacaataccgccgagcattaaggcaaatacccaaacccagcttacttgttcccagccaagtgagatgaagaagccaattgttgcagcgagtgaaacaggaaattcactcgtatctacagatccaataacttttctagcttcatttcctcttgctagaagaacgggtgtcgtaatcggcccccaaccaccgccaccagttgaatcaacgaatccagcgaataaaccaagcggcacaagttgtttggcagacatacgcttatttgaagtgacaatttgtttttgaatgatgaatcgtaataaaatataaacccctaaagtaaataaaaatacggaaatgtacggtttgattatatctccaggcaaattacttaaaaaacatgccccaacaaatgcgccgattgccccaggtaatgtaagcctggaaactgtatatttatcaacgtttccaaatttgatatgagatgcgccagaagctgcagttgtaacgacttcagctaaatgaaccgatgctgaagctacagccggtgcaataccaaacattaataatagtgaagtagacgttaccccatacgccattccgagtgctccatcgatcaattgggcgaaaaatccaataatagcaaagacaattaatttctgcataaataatccccctgtaataataaatgaaaaagacacttttcccgtatgagaaaagtgcctttggtttttccaatcagcaataattaaatttgtttcattataatacatattaatcgtataaatcaactgggttttaaagtttttgaattgaatgaaagaaaaataaaatatacaataaaaggatggagagaaaggggagaaagacatgttacgatttgatcatctcgttcacacagttcatggtacaccggaggaagcggcaaaacaaatgcaggaactgggatttcatactgtattaggcggagagcatacgaattggggtacttggaatagtttaagttattttgatttatcatatatagaatttttagcagttcaacatgaagaaaaagcgaaagaagcagaaaatccattagtacaagaaacagtggtgaaactacaaaatggagaaggaatgctacaaatcgcgatccgaacagatgcaattgaggagctagcagttaactttaataagtacggcttacatacgatagggccatttgaagggaaacgtatgagaaaagatggccgacttttagaatggaaaatgttattcgttaagcaagaagagaacggaccgaaattacctttctttatacagtggaatgaaacggacgaagaaagaagaaacgatttacgtaacagtgggacgattactgaacataaaaacaaagtgcaacaaattgaaacgattcattacgcagtaaaaaatgttcgagaaacagtacggaaatggaaagaagtaatgggactatctacaagctcagttgtgaaaaatgaaaaatggaatgctgagtgtcaaagtgtatcgtttggtgacattcaagtacagttttgtgaaccggttggagaaggtctagtgcaagaatacataaagaatcatggcgaatatccatttgcagtagagtttaaagggggaaataaacgagagcatgaagtgttagggagtttgtacatatattaatagaggtgaacgttgtggaagaaatgcttagagagatagagagaatactagaatggcctcgcatgttaaaagcgactgttatttcaaaaggcttttcattcgatgagaaatataaaattgaattaaagaatcaagaaacctattttgtaaaagtatgtgatgctgttcattttgaacgtaaacaagaagaatatacgtatatgaaacaattagagtcattacatattccaacacccaagttaattcatttcataataattgagaaattaaataaatgtgttcaagtatttgaatggacccgaggtataaatggtgaagaaggtttaacgaagttatcggtggaagaacagtataaggcaggaagaaaagcgggggaagtattaaagaggattcacccaattgaaagagaaagtgcaagtaataaatgggaaacatctagatggaataaatacgaaagatacatagaggcactaacagattacgaggtgaattttctggatttgaagccagtattaacctttgtagaaaatcataaagatttattgggaaatcgtccaataagatttttacatgatgacttccatccagcaaatagcatgattcataataaggaatttatcgttatcgattttggtggatatgattttggtgatccaatacacgatttttataacgtagcgatttttactataagaataagtaaaccatttgcggttggacaagttcacggttatttcggaggcgaaccatcgcttcatttttggaaactgtatacattgtacgtcgcgatgacattcccagcggatatcgtttggacgaatcgaagtacaccgcatttagtagatgatatgaaggaaagattaaatggaattttagaagatcataatcatttttcatcttatattccaaaatggtatcaatcaagcgaatttaataaataaaggagtaatttatatggataaaatagcagtaatttcagatattcacggtaatattcaagcattagaatccgtgttgaatgatattaaattaagaggaatcgagcgcattatttgccttggagatttagtaggaaaaggacctcattccagtgaagcaattgaaatcattcgtaaagaatgtgaagtagtcgtaatgggaaactgggatgattttattacaaagccgactgaatttgaagcattgaaatggcatcaaaaacaattatcggaagaacaaaatgactatttaagaaacttaccattttcaatcgagttttatatgagtgggaaattcattcgtatgtttcacgcttcaccgagaagtttatatgaaagaattcaaccacacgcttcaagagaagaacgtattagtatgttcgaaaatagtgatctgacggaaaatatagaaggggaaagaaaaccagatgtcgtttgttacggtgacgttcaccaagcattcgttcaaaatttcagagggaaaacgttatgtaatgccggtagcgtaggaaacccacttgaaataacacaagcttcctatttaatatttgaaggaacttacaatgaaaaagaagcagcgagcttttctattcaacttgtacgagtaccgtatgatattgaattagctatcagactagcagaagaactcgaaatgccagaaattgaagaatacaaacaagaattacggactgctttatatcgagggtttaaggggaagtaagctaataatatatcaacgatttttcaaatatatctatcataacttaaaatatatcaacgattttttcgagatatcagcgattcgagaaaggatatcgatttaccgacaaatagtgacatgaattattacctataattatattatgtaaactaattataaagggagatatcatgaaccgaaaacaacgaatcaaagaaattgcagatcatattgtaaagctaaacttaacccatccaataagagttggagtaagcggtattacagcctcaggaaaaacaacatttgcaagcgaactagcggaagaaataaaaaaacgaggattaccagtaacacgcgccagcattgatgattttcataatccaagagtgattcgctatgcaaaaggaaaagaatctgcaagagggtattatgaagatgcacacgattatacagctttcaaagaaagattattaatgcctttaggacctaacggaaatttacagtatgaaacgatttctcataacttaataacggatatgcctgtacataatgagccgctattggccacgcaaaatatgatattaatagtagatggaacgtttctattgaaaaaagacgttgcgcatttatttgattacaaaatctttgtagatacaaattttgagattgcgagaaaacgtggtgctaagcgggaaactgaagcttttggaagttatgaagaagcagagaagatgtttttaaacaggtatcacgcggcttgtaaaatgtatatagatgagcataatccgaaagagtgtgcgaatgttatatttaagaatagtgatttaggaaatccagaagttatatttcatgaaagagcgtaatacataatcagaaatatatgtatagccttttgtttattgttataattaaattaattttatgaagcaaataaaaggggataagacaataaaaaacgcaaaaaggggacaagaaatataatgaatgaagtactagaactaaaagaagaactactacaaattaaaaataacaattatgctgtaccagaagacgtagatgcatatccatatgcgcagtggatgctagattatatcggatcacctgatgctgaattacgtgatgatttaatttatagtacgcttcacacatggattacaaatgatgtatttagacaaaaagagttaagaggattaatgttacaagcaattagtcctgattatttattttataaaattggtgaaaagggaacagactctgtatttaaacgtgcattctccggattaattccaccacttattttatctgttcatgaaagagaaccgttgttatccgaagaacaactgtacagtgtagcagaacaagtgctggaatatgtatatttagaagaagatgtaagaggttacgtagaaggaaaaggctgggcacactctactgcacacgctgctgatgcactagatgctttagtgcgtactatacaaaatcgtgagttttcatatgcaattcttgcagctgttcgtcaaaaggttcgattaagtgattacgtatatgtacactttgaagatgagagattagtaaagccaattatgtctttacgtgaccaaaatcttttaactgaagaagagtggagcaactggttacatagtatagcaactgttgaagacatccgacatccgcagcatgctattttagtacaaaatattagaactttcctaagaagtttttatttcagagctttagagacagagggtagtacagcctttacagatgatatattggagactttgaagggtttgcgtaggtattaaaaattcgtttttctaacagaaaagtacataaaaccaacacctcccaaccatactaataaaatgttttggaggtgagtttaatggacaaaaaagactttgaaaaagtatataatgattatttacatcaaggggaagagcaagctcaatttgaaatagctcaggaagttacttcaggagcagaacaaattgttgctgttcgtaaaaatgatgaaggtgatttgattgcttttaaaacaagtagcgggagagagttagattatatgactgctcttagtgaagcaaaatcagggaagttagctcatgtggacgtatttcataagtatggtagagatattatacgtagtgaacctgatggaataaaagaaaataacttagataatttaccttcattttaaagggtaaacctcaagaagagaatgttcattacgatattctcttctttgttttgcgaagttttccttgcaaatagacgattcatttttaaagtgcgatcatacttttaaagagctctctaaatttctctttatcttctgctgtaaatggtttcggtccctttgtacgtttaccactttttcgaaccattgcacttaaatatcgtgtttgtaacaattgttcgatgttatcattcgtatacttatagcctttatggtgtagaacgatacagccttttgctaaagcgagcgaagcaagaccgtaatcttgtgttacgattaaatcttctttttttgctaactgcataattcggtaatctgcagcatctgctccggaatcaacataaattgtttctacacctttaggctgctgagcattagaataatgagaaaagctagtaactagagttacaggaatttctgcactcgtagcttcaaaaataattacatcttttacaggacaagcatctgcatcaacgtaaattttcatttttaccactcctataaagtgaaactttaatcagtggggggattcaccctccactgattattagttgaaccaatcgggcatttacgggcagttaatctcccacctaacttctttgttacagctgaattttgagctgggagttttattgcccgttaatgcggggtaactaggttcgtgttgataataatggtagatttttcttttgtcaaacgatagagctttatgtaaagttatttttcacaaactaaaatagcctcacgcaaacgagaaataccttcctcaatttgatcaatattcacttttccataagataaacgaatataaccatctttcgcaccgaaaatactacccggcataaacgcgatttcttgttttaaactttgcataataagttgtttttcgtttatcggttcttttagtttcccccatatgtatataccgccggttgggtttgaaaaagagattttatcgtgaagttgctcgtttagggcgcgaacgataacgtctcttttttctgctagttgttttcgtaacggtacgatatgcgactgaaatggtacagtttcgaaaaactgctgcataagccactgcgggaatatgctcatacctaattccatttggtgccttgcgtcggataacctttctactacggattgcggagcgacgagccagccgactcgtaatcctggcgcaatcatttttgataaagaatgtacataaatgactgttccattttcatcaatcgattttaaagtagggcaaggttgtttcttttctagcgtaagtaaactggacggatcatcttcaacgattgcaattcgtaaatctgcgcaaagtgataatagtttttttctacggtttggatgaagcatcgttcccgtagggttttggaaatttggatttaaaaagatcattttaatacggtgttttctatataactcctgtacatcatctgggttaatcccatgttcatcgacaggtaatgggaaaatacgaatacctgctgattggaatagaggcagggaataacagtgtgaaggactttcgaaagcaacagcatcacctggatttaataaacattgtacgatcaggtgaagtgcttgctgtgcgccagatgtaatcataatggattgctcagttgcttcaacttttaaatattccctcatatattttacaaccgcttgtctgagcggaagatagccttgtggatgatcataacttaatgaatgtgttaacggttgttctcgtaaaattgtttgtagttgatcgtgtgggtagagattacaaccgagttctccgtttgcgaaatcaataatattttcattttgttgtacttctgcccgaatatggcgaagtaacggtaagtttggtaagaacgtaccgccttctacgaaatttctccagttcggcgttaatgttggagaaacgccccacatatgtgtacttacacgtgtacctttaccagtcgtactttctacaattcccatagcacgtagttcgttataagcagtcgttactgtacttcggtttacatttaactgtgtagctaattttcgttcggaaggtaggaagcttcctggaggaagttctccgtatgtaatacgtttttcaataaagtcaacaacttgctgataaatggggattttactgtcgttatctagcttccattccatacaaacgcctccgcatctcttatatacattcagtataacaaattggctgggtaaaaaaacagccaattggacggtgttatatccagccaattttactatgctaaatatggaaggggagattcggatgaaacgatggcaaatggaatggctcctagtatctgttgcattagtatggggagcaaattatacaataggaaagtatggcgtggcatatatgtcatccattcaatttaatagtttacgatttttagtagcgtcaccggtattattacttattacttttatgatggaacgctcattacgtattgaaagaaaagattggttacgattagtagcagtcggcatcgttggaacgacaatgtatcaaacgatgtttatgctatctgtgaaatatacttcagcaacgaacgcttcattattaattgcaatgtcacctatttttacagggatattagcagtattgcacaaacaagaacgtttttcgatgaaagtacaaattggttcaatcgtagcctttattggtgcagcattcgttttattaacaggacatacaggaggagctacttacgagtatgcgtggctcggaaatgtaattggattagtcgcagcaattgcgtggggatggtatccaatattagcgcaacctcttattacaaaatactccgcaatgagagtcacatcatggtctactttaattggaattgtaccgctagttatatactgtttattcaacgtaaattctttaacgtggccagtagatacgccaagctggggatcgcttgcatattcaatcatctttgcgaccatcttcggacttgcaatgtggtatgtcggtattagtaaaataggctcaacgaaagtaatggtttatatgtatcttgtgccattgtttgcagtgatctttgcggcagtaaccattggagagcaaattaatttgatgcaactcgttggcggacttattatttttatcggcttatatgttgtaaaaaaaggtggaatgaaaaagcctgctctcaatttgaaaaaagtaagttaacagtaaaaaggatctctttcatatagaaggagatcctttttgtttttgtaataaaagcgcttgttcaacggcccatttttgatgatcgtgtatgagaagctctatagcatgcaatggagacatccaccttagaacatgatcctcctcacagttttcagtttgtttctgcaccatattcgcaatataaaaaaatccatcgtttaaataatatatatcttccttttctgcataaaaatatcgagccgcattaccgatatactgatcaattttaattgcccatcctaattcctctagtagttcacggtgcaaacattcttcttttgtttcattaccttccataccgccaccaggtaaaaagtaacggtctcctttttggataacagcaatctttgaagaagatgattgaaaaataatcgcataacaactaggccttaatgtataatgaacgttaatttttttagagccaaatgtgagttttgaaatcataaaacacgacctttctctataaaatacataaaaggaatattaaggtaaacgtagaattgtataagtataatcttaacagattggagtgataacaacatgataaatcgaaaatgttcaagatgtaaagaaataacaggtacgatgcacggtggtaaaaaaattaaggaagaatttctatgtgaagactgtttgcaaaaaggaattgagagcggggaaatcgaattatcacaagtggaacaagaaaaaacctcgtatctttctataaagatattaaaaataacgagtgttatttatttaatagtatcaattataactgctttttctgctggagcatttatacaagatccagggcttggtggaatatctttttcaataacaggtacagttggtgttatgataattggatctatattccagtctgttcttgtattttgcgggatatgggtattcatcctattagtagaaacagtcattaaaatttatgaaaaaatgaagtgagtgagagggagaaacatatgcgagtaagaaatatccaaggggaagattatgtaaagattcattcagttttaaatgattggtggggcgggagagacatggttgccatgttgccaaaactgttttttgttcactttcaagaaacgagttttatcattgaagaagagggtgaaacgttaggtttcttatgcggatttttttcacaaacatataaagatgaagcatacgttcattttatcggtgtaaatccgaagtatagaagaagaggaatcgcatcgacattgtattcttatttctttgatgtcgctcgtgcaaataatcgtaaagttgtaaaagcaattacgtcaccaactaataaaaagtcgatacagtttcatcaagaaatcggttttcgaattgaggctggggatgatgaggtagagggtgtatcggtacatacaaattatgatgggaatggcgggagtagagttttatttttgaaacatgtgtagataaaaggggaatgattgcatggatatgcagcaacggagaatgttagtagcaggaatcgttttagcagtagtgttaggggtaggctatttttcgacaaacgtattacaaactttctcaatcgtatgtttagcagtagcgattgtatttggggttatagggagcatacaaaagaaacgtcaaaacaagaattaaaaatttgaaaattttatgatcccttaaaatttctcgttttagggtatttgtttttcttagcttaatggcgattggattgtatcacaaattctattaaattaagtttatatcaaaacaccattcttgccctgttgttgcagacataatgatatctttttttattttgttaatttgatagaagtgagtgggatgtcaaaagcaatttctataaaataatttcatcaaaagaaggggatttatatgcattttgaaagagatagatattttttggagatggcattggaagaagcagaaaaggcattaaaagaaaacacatatccagtaggagcagttattgttgatggaaataataatgtcattgcaagaggaagaaatagagtgcatccacaaaaagacataacagctcacgcagagatagacgctattcgcaatgcaggggaagcaatgtttgatgcaaaaataaaaaatgagaagtttactatttatagcacgttggaaccgtgtccaatgtgtacaggtggtattttattcgcaaaaatacagagagtagtctggttactaaatgatgacttaggttttggtggatataaaaagataaaaaatgctttagttttcgaagggaaatttaataaaatcgacatagtggaagaaccatttgaagacttaaaaacaagacaaaaagaacttatgagacaatgggagctaaatcccaataatattattaatttgcgtagggctataaaaaaatagttgtttctttcaattaaatcgggatactgccacattaccatcaatttaaaaaatatagtgaaattatatcgatttaacaatagaatatggaagaatctattacgaatagaaagccgtcctaaaagtattctaggatggttctttttgttgtgaggagataaagagtatggagaataaacagagtagaaatgagtatgtaagacgcatacataaggttcaagattatatagaatcaaacatagacagttcattatccattgaagagctagctgatatagcaggattttcgaagtatcattttcatcggatttttaaaggaatagttgatgagccattatctcggtatgtgaatcgcttgaaactagaaagggcaacacatctacttacatatcgcgcagacatgacgattacagatattgcgtatcacttcggattcacagattcagcagttttttcccgaacatttaaaagtcattacggtgtaagtccgtctcaatatcgaaacgataatagcaagaattgcaaagacgtaaggggaattcctcaatacaatgaatgtaagaaggttcgaggaaatgttgaaattgtaacagcggacgatataaacgtcgcatacataagacatacaggtacatataaagagttagctatagcttttccagaaatgatagaaaaattatttcgttacgcggcgaagaaaaactatcatgtatttgaggatacgaaagtattaaccatttaccacgatcatcatgaatttactgaggactatcatttaagaacaagtctatgtgtaacaatttcagatgaatccacagtagaaacgaacgacgttggaataatggtaataccttctggaaaatatgcagtaggacattttgaaatattccaagatgaatataaaggagcatgggatttcttatacggtgaatggctgccaaatagcggatataaaccgagagactcgtatccttttgaagtatatagaaataatccaaagcagcatccaaagcataaacatatagttgatatatatgtacctatcgaacctttttaatcataggttaaaggggaaagaataatgaaaactgctgaaaagttagatcagattataaaagaagaatatgaaaatatgaatggtatgttagtagtgcggaaaggtaatgttatttttgaaaaatattataacgattacggacaaaatgatacatttcatgtagcgtcagttacaaaaacgataatctctgcgctaattggaatatgtatagataagggctatataaaaagtgttgatcaaaaagtaatagagtttttccctgaatataaagtaaagtcatctgaagtaacagtgcgacacctacttacaatgacagctccatacccttttgtagactggcaggaaccgttagaagaattatgtacacaaccagactgggtacagtatacacttcatagaatggggaacggtggagagattggagcttttaaatattcatctgcaggagcgcatgtactatcagcaatgattacgaatgcaacagggaaaagtgcacgtgaatttgcgaatgagtacttatttcaaccactcggcatgagcgaaattccaaactacaatatgaaagcatttggattcgatgacttattcggaaaagatgtgaaaggatgggttcacgatccaaacggtatttcgacgggcggctggggactaacgttaacggttagggatatagctaagtttggacagctgtatttgaatgaaggtattcataatggaaaacaaatactatcaaaatcatggataaaagaatcaatagcgatgaattcaaatcaatatggttacttatggtggttacgagaagaagagggtgtctattcgtattgtgcaatgggtgatggtgggaatatgatttgttgtattccagagaaggaattggtggtggtgatggcttctgaagttgtgccagaaataaaggatagatggagattaatcaaagagtatatacttttaaaagagtaatggtgaacttgtagaaaaatttaaacgctccccgtaactttcctcaataaaaaatcgttaaacattaggaagggttattaatcacgaatgggggagaaccatgaaaattctaattctaggcggtacacgatttttaggaagagcatttgtagatgaggctttacagagagggcatgaaattacgttatttaaccgaggaacaaacaaagaaattttttctaatgtggagcagttaaccggtgacagaaataacgatgtatcaagtttaaaaaatcgaacgtgggatgttgtcatagacacatgtggattttctccacatcatattaggaatgttggagaagtgcttaaagataatattgaacactatatattcatctcaagcctttccgtatataaagattggattccgcatgacataaaagaagactatatattacaacctgaaccgacggaagagcaaataaaggctgtagagaatggtgaaatatctccttatgagcattatggtgcgctgaaagtattatgcgaaaaagaagcagagaagtattggccggggcgtgttttacacgtaagagcaggacttctttcaggaatgttcgattatacagatcgacttccatactggattcagcgtgtagcaaaaggaggtaacgtgttagttccaggaagaaaaaatcgtccagtgcagatagttgatataaaagatgtcgcgagatttggactcaacatggcagaaaataataaagcaggtacattcaatataacaggtccgaatgatgaattgacgatggaagagctgttaaatacgtgtaaaaaagttacgaatagcgatgctgaatttgtttgggtagacgaatcgtttatgagtgaacacaatgtgcagccttggacagaaatgcctttgtggattccagaaactttcccattagatggtgagacgaagccgtggagaggcgggttttctatttgtatcgaaagtgcggttaatgaagggcttacttttagaagaatagacgagacagttacagatgtgtatgagtggatggagagtacggaagaatgggaattaaaagcaggtatttcaggcgagagggagaaggaattgttagaaagatggtatcaataaatttagcggagttctttgagtatgcttgattgcacataaggaggaaaaggtgatgtggaaagacaccattcacagtatctcatcaaatttaagcttgaaaaacccagctacgaaggatgaacttactgatatacaaaaatgtttacatgtggagttaccgaatgatttatatcaattattacaggaaacaaacggtatagaaggtgaatacggtgactttatatggtctgcttcaaaaattaaaactgaaaatatgagtatgagaaatatagttgattttaaggatttatacatgccttttgactgtttattattttttgctgatgggggaaatggtgatttgtttggctattccattttgaatggaaaagtacaaagagatgatatatatgtatggaaccatgaaaatgatagtagaacgtgggttgctctttctttaaagacttttatggagtggtgggagagtggaaagatgataatttaaatatagtatcaaaaaaagtgccttgttactaaagaaacaaggcactttttcacgaataatgaatctaccactcaaacggttcttctccatacagttcccatagcttaggaaacatcttttttaaaccttcttcatcgtcttcattccagtcaaattcaaaatctacatcgtcgaattcttcattagataagacatggtaaagtgtaaagtaagtatcatcttcgtcaccagttttttctgcatatacagtgaaaccgaaatataaagaaagttcttctatttctgggacgtcatactcactcaaattttctaatacaggaattaatcgttctggatcttcaatacaagcttcgtatgtctcttttccttgatataataaccatccgcggaagtaatcgaaagtatcatctgaacagccacccataataatataggctgctgcccataaacgggaggtataggaatctttcaaaagacgatgcatatgcgtatcaaaagctacaatttcatgtactgtacgtttagcaaggtgggaagtaagccattctatttgttcttcttggtcttcacctttcgtttttgcacgattaagtagttcccaaaattcttcttctgttatcgttttttcttttatgtaatcttccccaggcaacgggtctgtatatccttttttacgtttggaagcaactagtttattagcttctttcatacattcttcttctgtttcaaactctttcgctttcacactgccagctgtgccaatttttccgtaaaacacaacatagtctttttctttcacaacgattttccaaaacttatttgatttctcagtttgctggattaataacgtttccatccgtacccccataatgttttctagtgtgcaatatgattgtaacatatgcatatacacttgtaatgatgaaaaataatagtttagaaaattcaaaaatcattgaatggagtggataaatttagtaaccttatttgtacagtaattacataattgttttgtaataattcgatatttatataagggggcgttacggatggatcttacatttaaagttgaggaaacatgttttaattaccgcgttggagcaatttgtaaacatgataataaaatactcattctgcaaggtgacggtgaagattttttgtatgtacccggcggtagagtaaaaatgctagagaatagtgaagatgcattaaaacgagagcttgcggaagagataggtgttcctattaaaaggaaaaggttaatatggtcagtagaaaatttctttacactttctgagcgaaagtttcatgaaattagtttttattatgaagtagagctacatgagttacctgcgagtggagcggatcaatatattttggaagaagagggtagaacgtatttgtttagatgggtgccagtagaagaactgcatacatataacttacagcctgcatttataaaagagaaagtaaaggatgtatcagttcacacagaacatatcgtattacaaaagtaaacgtattcggaggagaaaacggtgaaggggactaaaaaagaggtacatataaatgacaaagtaattcgttacacacatatcgaaaaaggttctagtacggtttgttttatgttttcaggttcaggatacaattatgataagccgttattttattacgcaacgatgttaatgcttgaacataaaatagatgttgtacatattcattattcttatgatggacaattaatgaataaaccaatggaagaagtaacgaaagtaatgatggatgatattaatcctgtaataaatgaagtattaaaagatgagcaatacaacgagactatgtttttagggaagtcattcggaacaattccgattgcaaatgatttaatgaagagagaagaattcgcgcagtcaaaaatgatactacttacacctttactgacgtttgatacaatttttgattttatcttacatagtcgacacgaagggtttttagttattggggataaagatcaccaatacaatgcagatcaaattgatcagttatataaaacgaatttacagattgaagttgtcaaaaatgcaaatcattctgtaaatgttgggggatatgaaacggaaaattcaattgaggctatagcgaaaataataggaaaacttaaagaagttgttaggacaaactaacctattaatacatgcaaaagaggtgcgaattgcacctcttttactttaataagccttcaaaacatgaagtaaataatccttacgattcagcggattataatcaacacgttttcgagtagggaagggagccataagttttgtgaaaccagctggcttcgttgtaaatatgccttctccttctgtaaatgaatgtagtattcgtttgaaactctctgttttcgcaacaggtaatgatcctgttaactgataagaattgttattgaatataggctctgcaaaagttgctggaacggcagcgagcttatacattgcggtactaattgcttgctccggtacagttaattcaaacgcattaactggttcatatacatatgttgcagcttgttttaaagcatccattaaaacgagcggtgttaagtttctaaagtcactcgctgttgtaacaggactagcataaccagtatgtgttaacgtgacgataatatctgtaacttcccacccatataatccttgttttaacgtttgaaataccgtatcttcaatcgctttatgaaatgctaaaggtagtgagccgagctcaacacctaatttatatgttataccgcaattaagttcaccacgttcaactttgaatccgattgttgcgtaaaatggattctctttttcacccattacttcaacagaattgcctacgccaattggtttctcgatacatacaactcgcgtatttgaaaaattaacctgcaaattatatttctcataaagtgttgtttcaattacttctttttgtacctcaccgaaaaggcgaatatatagttcattatgaacatcgtctttccaaactttaatgagcggatcttcttcacagagttccataagaacagcgtataaattatgaatttgctctttaggtaccgcatcaatggcagcttccatttgtggttcggcaaagtgaatatcttttatataatccgtacgttcaccgataatatcaccaattttaatatcattcagcccccacactttacaaaactcaccgctaggaacggtagaagtttgaacggtatctccattatgaaataggcacattttttttatcttttctttatggaatagagacttactgcgctgtatattaacatattttctaacatgtaagctacctgaaaaaactcttatataagcaaccttttctccagaaggttcacgttcaattttaaaaacaacaccggataatggttcctcttgtgccgatgtaagagttggaatgagagccggaagtttttcaagaagttctgttacgctcataccagtcattgctgaaccgaaaaagattggatacacattcgcttgctgtatttgctgttctagtttttctcttaatagtgcgtccggtattatttcgttatttacatatgattcaagtaacgattcattaaatggtgctaacagttccatacaatcgtcatatgatttgtattcaatgatccgggcttctttcgttccttcgtttagaacagagtagaaggggaatgcttcatttgaaagaacctcttttatttgtttcataactttttcagtgtttgcgccactacgatcaattttattaacgaataaaatagtcggtatgtttagtttctgtaatgttcgcattaaaatttttgtttgtgcttgcacaccttcaacggcagagataactaaaatcgcaccgtctagaacgcggaatgatcgctccacttcagcgataaaatcagcgtgtccaggtgtatcaatgacatttacttttacagcatcaataaagaaagaaacgacagatgctttaatcgtaattccgcgttgtctttctaattccattgagtcagtttgtgtattaccactatctactcggccaatttctttaatcacattcgtttcataaagaatacgctcagtcaaactcgtcttgccagcgtctacgtgcgcgacaatccctatatttattgttgtcatttgtgaatatcctcatttcattttccattttcaattcctcatttctatttgtatattgccgcattatcaatcactctccagttctttaaattagtattattatagtgcaattaacattatttgtaacgctacaaagcgccttaatttgaaaaaaataaaatgaaaacaaaatgcttgcattctaaatcgatatagattatattaattgacatatcaactattgatacatcaaatgtttttattttgattgtaaaggagggttaatttgacaagttcatgctcaaaagaagcgattattttatataaattacactttctaaataaagaagtaagttcgaaatttgaagggtgtacgggtatgagccagtctcgattagagcttatacttcagttatatgaagtaggtgaaattagtcaaaaagcacttcaacaagaagtgaatattgataatgctgcgataacaaggcatttaaagcagcttgaggccaatgaaatgattgtaagacgtaaaaatccagatgataacagaattacgttagtttctcttactgaagagggacgaaataaaattcaagcatttcaagaggaaaaagaacgttttgcagcatctgcatttaaaggattaagtgaggaagaacgcgataatcttttaaatatgttaaatcacattcaagaaaatataaaagaattataaaaaagggagaatacaactatgactaactcagtaaaaacaaatgattttaacgaaattttaacaggacgtcgttcaattcgtaagtacgacccttcagtgaaaattagcaaagaagaaatgacagaaattcttacagaagcaacacttgcaccatcttcagtaaacatgcaaccatggagatttttagtaattgaaagtgacgaagcgaaagcaacacttgcgccacttgcgaaattcaaccaatcacaagtagaaacatcttcagcgatgatcgctttatttggtgatttaaataactttgataacgcagaagaaatttacggtacagcagtagaacgcggtttaatgccagcagaagtaaaagaagatcaaatgaaaaaactttcagcttacttctcaatggttacaccagaagtcatgaaagatacagtgctaattgacggtggtcttgtagcaatgcaatttatgctagcagctcgtgctcacggttacgatacttgtccaattggtggatttgaaaaagaccaaatcgcagaagcatttggactagataaagaacgttacgtaccagtaatgttaatttcaatcggaaaagctgctgatagtggttaccaatcagtacgtcttccaattgacaaagttgctgagtggaagtaatctaattaggtcatagaaatatatggaatatgaaaggggaaacaccatgattattattcacgcaatatttcaagtagacccagcaaaacaacaatcatttttagaagaaattcagccactcattcacggttcaagagaagaaagtggaaatgtatcttatgatttatataaagatacagaaaaagaaagtgtttatacgatggtagaagtatggaaagatgaagcagcagttgcgagccataatacgagtgaacacttcacatctttcgttagtaaagcagcacaatttttaactgctccgcttaatataaaagcttataatggagaattagtaaaataataaggtagaaaaagatgactttagcatatggctgaagtcatcttttttgtataagtagaatccattttggactcagttatgttgatagataagcgttgctcgcatcctcagtaagagtgctgaattgtatgttaaattcgaacattcggtttattgggatatttttccgtggtataattttcttgtaaataaaaggtagaggggagtaagtaatgggagaatttcaaagtaatttgcatacggcaacgcaacttgcaacgaaaatgagaaatgcttcagatagaatgcaaagtgctactagtcgctctataaataaggcaacgcgtacgacactatctgtgaacttccaagcacaagaggcaaatcaacaaaatttacagatcacgaaacaattttgtactgcttttcaacaaacaattgataatatccattccgtagcaaatgaatttgagaaaatggatacaggacttcaaaagacttttcaataatgtaacaacctacgtaaaggggaaaaggtagggagaaaagatgagtcaagaaattgaaacgagaatcagtcaatgtaatcaaaaattacgaattatatttgaagaacaaaatgaaaaccgaattgcgctgcaaaatcaagaacgagctgaggttagttttcatgaatggaaaaatagaagtaatcgtttatttaaccgaatactagaaacttggcacggcgacaaagaagtgtttcacctttttacgaatatgcggcaagaaatcggacagtatgaaagaaaacttacattcgaattagaaaatgaaaaagagacgttgcttaaagaaaaacggcatctcagtgagaaagaaaacgacctttcctatgaacagcagcaactacaaagggaggccaatacatgagtttaaacatgtatttgggagaagtacaaagtcaaactcaaagtatgaacgctatatgtaatgctacgattcaaagtatggaacaagccattcaatctattgatgcctttgcgatagacacagtattacaaggacaaacatacagtagtgcaaaagcctaccttgtccaaacatttcggccattagcgcaaggaatcatatgcttatgtgaagaattaattcgccaaaacgaagcatttccaaacgagttccaagcgaaagttgcttcgacagatgtgatcgaacaagaaataagagaacaaatacggggaattaatcaatcgattacaagtatagaagcaatagaagtacttacaccgatgcccggagtaagtgcgattgtaacggtattaggtgcaatgagaaaaaaactggaagaaaaactagagcgtttacaagaattcgaacattcatccagcaacaactacagcaccgccctccaattagcggctagcatcacagccggactcgctgaagtgcaaagcgggaaaggatttagtcctttctagctagctttttagaaagaataacgttttttgacacttgggggtagtgcaaattcttaagttgatgggcatgtggagtcacccccatcattattagaattagctaaaatagtaggattaaatgattataaattaaaaattggttttaaagaattatttggcacgtccacatttgcatatttaagagaacagcgaatggaaagagcaatgcttttattgcgttcgggaactagtaatgtgaccgaaacggcagttgctgttggatacaataatattagtcatttttcagagtcatttaaaaagaaatatggaatgaaaccttctgaaattttgcgtatgtattaaaaatccgttataccgtaaactcctccaccatttggtagttgtatttcgtcataatcattataattacaatcaacatccaattggaaataattttttatggaggaatttaaatgaaagagcggaatgaaagtcatttttggatatttgtattaataggaatctttcttattataacaacaactggtttcgcccgtatggcatatggaattatactgccatttatgcaggaaggacttcacttatctacggctcaatcaggtatgctaggaaccatactttttttaggttatttattaactgtaggaacatctggaatatttactatccgttttggcgcaaaatcagttttattaataggcagttggttcgtcgttataagcttaatgggattagcgtttgtttcttcgttttggatagttgctttttgtatgctatgtgctggagctggtagtgctcttgtatatacaccactcatgtcaataacggtagggtggtttccagacaaaagaggaactgtaatgggactgttattaagcggtgcaggtataggtatgctatttagtggaataattgttccttatgtagtgcgcacatttcctgagtatagttggcgtggtgcatggtttttgtttggagttattacatgtatcattgtatttgtcgcttcagttgttttgaaaaatccagaagttactgaagatgagcaaaaaatgagtaataaatcgtttttatggaaaacgaaagaactatatatcattgcatggatgtattttattgttggtgttgtatatttaattccaaatttatatcaaactagttttatgattgatagtggtatctcagcatcaatttcggggactgtttatgcaattgctggcatcttttcaatcgtaggagcatctgtctggggatttatttcggatcgaattggtataaagaagagtttatgtagtgcgcttttattagctattataggtgatatggctccaattatatttggaaatataactggttttatcgtgtcggcaattatttggggttctagcctcggaggtatactattattaattcaagttgcagcttcaaagcaagtatctccgaaatatgtctcaatggcaattagttttatatctgttttctatgcagttgggcaaatgattggacctggaattgcgggctgggttattgggagaagtggttatgcattagcttatgtattaggtgctttcggtttctttatgtgcatatgtatggggttatgcttaaaaagaggaaatcttacaaactcagcgtatttagagaagtgagtattgtcatgaaatgaatctttttaacaggagggaagaaaaatggtccatgtgaaggatgtattagcggatcaattgttggcgaatgcaaacgatcccagttggtatattccattttcagatgcagtgaaagatctatctgagagagaagctttctggaaaccgaatgaagagagtaatagtatagctgaaattgtacaacatttactgtattggaactcaacgtggcaaactaggtataaagaatcaaatgtgaatgcagtacccgctattggagataataacaaaagttttatgctttcagataatcaaactttcgatgaattacgggaaaaactactagaaaaactgttacaatggcaaaatcttataaatgaagaaaaggttgaaagtgatgtagtaggatttcctgtttctgcaaagtggtgggaagtgttagcgaatgtaacaactcataatgcatatcatattggccaaattatttacatccgaaaattacagcggagctttgataatgaataaaataatagttctcaaattaggtgaacaaaagtggacaaaacgagacagatgtctcattttgtccacttttttattatgaaagaaaagagaaaacttattaaatcaaggattagaatttggcacggtacttgcaatataaaagatgatcaagaaaataggagggctggacatgttaaaaacaactgaaagtaaagggaatgaaattacgaaagaacaagctcgttggatgtatgaaaaaatgttagagattcgtaagtttgaagataaggtacatgaattgttcgcgcaaggcgttttgccaggtttcgttcatttatacgcaggtgaagaagcggtagcagttggtgtatgtgcccacttaacggatagtgacagtattacaagtacacatagaggtcatggacattgtatcgcaaaaggttgtgatttaaatggtatgatggctgaacttttcgggaaagcgacaggattatgtaaaggtaaaggcggttccatgcatattgcggatttagataaaggaatgcttggtgctaatggcattgtaggcgggggtttcccacttgcttgcggttcagcattgacagctaaatataaaggaacaaaagatgtaagtgtttgtttcttcggtgacggagcaaataatgaaggaacattccatgaaggggttaatttagcggcgatttggaagttaccagttatttttattgcagaaaataacggttacggtgaagcaactacatttgaatatgcttcaagttgtgattctattgcggatcgtgcaaaagcttataatattccaggcgttcaagtagatggaaaagatcttctagctgtatataaagctgctgcagaagcagtggaacgtgcgcgtaatggtgatggtccaacaattattgaatgtatgacatatcgtaattacggtcattttgaaggtgaagcgcaaacatataaaacatcagaagaaaaagaagaacatttaaatgaaaaagatgcgattgtgaatttccgtaagcatttaattcatgaaggtttattaacggaatctgaacttgttgatatggaaaaagcagtagatgatgcagtacaaagatccattgaatttagtgaaaatagtccatacccagacgatgaagaattattaaaagatgtatacgtttcttacaaataagaggagggtgaaaaattatgactagaacagtaagtatgtcaactgcaattaatgaagcgatgaaaatctcaatgcgtcgtgatgaaaatgtaattttaataggtgaagacgttgcaggcggtgcacaagttgatcatctgcaagatgatgaagcttggggtggtgttcttggtgttacgaaaggacttgtacaagagtttggccgaaatcgtatattggatacaccaatttctgaagcgggttatatgggagctgcgatggcagctgctgcaactgggttacgtccgatagctgaattaatgtttaatgattttattggtagttgtcttgatcaagtattaaaccaaggtgcaaaattccgctatatgtttggtggtaaagcgaaagtgccagttacggtacgtacgatgcacggtgcaggttttagcgcagctgcacaacattcacaaagtttgtatgccttatttacgagcattccaggtataaaagttgtcgttccttctactccatatgacgcaaaaggcttattattagcggcaattgaagatgacgacccggtaatcttctttgaagataaaacactttacaatatgaaaggtgaagtgccggaagggtattatacaatttctttaggaaaagcagatattaaacgagaaggttctgatgtaacaattgtcgcaatcggaaaacaagttcatacagcacttgcagctgcaaagcaattatcgaaaaaggggcttgaagtagaagtaattgatccacgatctttatcaccgcttgatgaagatactattttatcatctgttgaaaaaacaaatcgtcttatcgttattgacgaagcgaatccaagatgtagtatcgcaacagatattgcggcaattgtagcggataaaggttttgatttgttagatgcacctattaaacgaattacagcaccacatacacctgttccgttctcaccaccacttgaaaagttgtatttgccaacgccagaaaaagtaattgaaactgtatcagaaatgattggagaccaatctttattacatgtgtaataaaacgatgagaagggagagagacacatggctgtagaagttgtaatgccgaagttaggtatggcgatgaaagaaggtattattacgagctggaatattaaagcaggcgataatgtagcaaaaggagaactaattgctagtattaattcagaaaaaattgaaacggaaattgaagcgccagctgatggtacggtacttgatatagctgtaagtgaagatgaaggagtgccgcctggtactgtaatttgctacatcggtaaaccaaatgaaaaagtagaaatgcaggaaagcacacatgtggtagaagaaaaaacatctaatatagaagtacaaaatcaagaaccaaatgggaaagaagtagcgaagcaaagaattaaaatttcacctgtagcgaagaaaattgcaaagtctgaaaatctggatatcaaggcattagttggtacaggtcctggcggaaggattacaaaggcagatgtattaaaggcgctagaagaaagagtagcaaatccagaagtacctgaacaagaagaaagtacagtcgttcctgttactggtatgagaaaagcaattgcgagtcgtatgcatgcaagcttacaaaatagtgcgcaattaacgttaacgatgaaagtagatgttacagatttagttgcattacataaagacatagcgaaagttgtgcaaaaacgatacgaaaacaaactaaccattacggatttcgtttctcgtgctgttgtattagcgcttagagagcataaagaaatgaacagcgcttatatagatgatgccattcatcaatttgaacatgtgcatttaggcatagcagtcgcattagaaaaaggattagtcgttccagctattcgctttgcaaataatttatctttagtagagttgtctaaagagattaaggatatggcacaaaaggcgcgagcaggtagcttaagtagtgatgatatgcacggaacgacatttacaattagtaatttaggtagctttggtattgaatatttcacacctgtattaaatacacctgagactggtattttaggtattggcgcaattgaacatgttcctgtatataaagggaaaaaatttaaaaaaggtagtatgttacctttaagtttaacattcgatcatcgtgtactagacggtgcaccagcagctgcatttttacgcacaattaaatattatttagaagaacctataacaattcttttataaagagaaggtgagagaatgagtaaattagttgtaattggaggcggaccagctggatatgtagcggcaattaccgcggctcaaaatggaaaagaggtcactcttattgatgaagctgaccttggcggaacgtgtttaaatgttgggtgtatgccgacgaaatcattgttagaaagtgcagaagtgcatgacattgtgagaaaagcgaatgattatggggttacgcttaatacaggaagtatatcaattgattgggatcaaatacaggcaaggaaatcacaaatcgtaatgcaactcgtccaaggaatacaatatttaatgaagaaaaataaaattaaagttgtaaaaggaaaagcgaaattcgaaacggatcatcgtgtgcgagttgtacaaggaaataaagaagaagtagtggatggagagaggtttattatcgcagctggttccgaacctacagaattaccattcgctccgtttgatggaaaatggattttaaatagtagccatgcgatgtctcttgagagtgtaccatcttcattgttaatcgttggcggtggtgtaataggatgcgagtttgcaagtatttatagtcgccttgggacaaaagttacgattgttgaaatggcaccgcaattattaccaggtgaagatgaagatatcgcacatattttaagagagaaattagaaagtgatggcgtagaaatatttacaggagctgctttaaaaggattaaataattataagaagcaagcttcatttgaatatgaaggtagtatccaagaagctaacccggaatatgttctcatttctgtcggccgaaaaccacgtgtacaacaattagatttagaaaaagcaggggttcagttttcaaataaagggattgctgtgaacgaacatatgcaaacgaacgtatcacatatttacgcagctggtgatgtgatcggtggaattcagcttgctcacgttgccttccatgaaggaacgacagcagcattacacgcgagtggagaagatgtaaaagtaaactaccatgctgtacctcgctgtatttatacagctccagaaattgctagtgtcggtttaacagaaaaagatgcaagagagcagtacggtgacatacaaattggagaatttccttttacagcaaacggaaaagcgcttattattggcgaacaaatgggtaaagtaaaagtcattgtggaacctaaataccaagaaattgtagggatttctattattggtcctcatgccactgaactgattggacaaggaactgtaatgattcatacagaagttaccgctgatataatgagagattatattgcagcacatccaactttatctgaggcgattcatgaagcgttaatgcaagcagtaggacatgctgtacatgcttaaatagaaatatgataaaccactattctctaaatgaaagagagaatagtggtttgaatttttatagaagaaattaaatgtcttattactatttaatttcaatcgctgaagtaatatcgttccaatcagcagctaaattagcagttttaccgtaccaatcagcgtgtttaaataaaacgccttttccatatccttgtgttgaagtgtgctcccaaagtgtcgttgaataacttgcagaaggtgacgctgtacttacagaagaaattctgtcattccagctagatggtaagtttttaaatccgctgctccagtaaatatattggccacctttatctttatgttcataaaaatcagtactaccagcaccgctacctaaaggattaattttatttttaattgcttttttatccttttcaatatacgcatctaatgtttcacgactagtaaaaccgtaagctagccaatccctattttcattttgctctggtaataccatagtaatttggatatttttcttatcctgatcatttaattttgcaaatgaattaacattttgttcatccacttttaaataatcaaatgacttacttgaagtaacctttataggagtaacaaagtgttctatgccggaaaactttgaaaatgcttggtggttatatcatgaaatagctcttactgaagatggttttaaactaggtgttttatttgactctccatttagagaagtgacgattttcgcggcagatgtattacttgtgaagaaataatgttgtatggagtattacaaacgtttgacataataaaaaaataaagttattgtagatacatgaagtctacaataggagctgtattatgaaatattctaaagctacaaattatgctcttcatacaatgctttttctggcaaaggctacaccaaataagttagttagtgttcaccaattagcagaaatgcaaaatgtttcaccaacgtacttgtctaaaatactaactaagttgacgaaggaagggatgatacattcatcatctggtccaaagggcggttactcgcttagtaagaattgggaagatatttcatttttagatattatacatgcaattgaaggtaaaacatcattgtttgaatgttgtttacatgacaaacctggatgtttaattaatgaagtaatgcttgcagcagaagagaaaatggaagaaaagttacgaaatcaaaaaatcgtagatcttgcgaaaaaaataaaagtggatttttaatctgcttttatttttaaattaattaaggataaaaagactcttcgatatctttaattgtagttagaaaatgatatgaagaaggagagaagatgatgactaaattttggaatgatcgatataaatcagatgaatatttttacggggaagaacctaatacatttattaaagaacaagcatttcgtttagcaaatcacaataaagtaatagcatttgcggagggagaaggtagaaatgctgtatttctagcaagacaagggaacgaagtaacagctattgattattcggaagatggattagagaagacaaaaaaattggcagagaagcataacgtaaacgtgcatacaaaaaaagtagatttattagctgatagtttgccagaaaatgaatatgatgtagcaattatggtatttggacattttcatgataattataaaaaaatgatattaggtaaaatgatacaaacgataaagcctggtggtttaattatgtttgaagtttactcaaaaaaacaaataaactatagtactggtggaccaaaagatgttgatatgctgtatgatccaattgatatccttacttggtgtgaagaacataaggtaattcatttctttaatggcgaacaagagcgaattgaagggaaagggcacactggtttagctgatgttattcaagttgttattagaaaatgaatataagtgttaatgaaagttaaatgtatgaatgtaaaagaccagtcatgtaagactggtctttctatttagatactaaattatcaagcttccaatatgtatctgttaacggcgctgctttgctatctatgtataaatacatattatttaaatcttttggtgaagttttcagttcaaacacaacgtcagtagttaaagagaattcgtgtggaacatttttatagtgctcgtcatctatcggatgagcttcaccttcatatttctgaccagttttttcatcttgtatgaaatattttatttccgaaagatcaatagtttgtccatcgtcccgaacattattaatcataacacgagtagtaaggcgtcgctctttgtctattttttcaaactttgcattttcaactgtcgctctatagtattcgtttttaactatttctccatagtgcattgcattcttttcgagagcgctcttttcttgttttgatgtagtattgctattacatcctgttaatattccagtaaataataatgctgtacatgtcgttttgattaatgatttcatagtaatccctttctgtattaaaaagtaaaacataggaataattttacatcaacaggaaggtaaatgaaagtatttttgcgtaatatacagatatacatttattcggttggcaaattaatgggatagaaagcgggagaagactgtataaaacggaataaataagaactgaaaatattgtaaaacagaagaggcatacatataattaaaataaagtttaagtttctgaatcttcaataacggtggtgataacatgtttactgaagaacgtcgagagagaatcttagaactacttaatacagatggaagagtaatcgcaaaggaacttgcggaaagatttgaaatgtctattgattctataagaagagatttgtctattatggaaaaggatggtttattaaaaagaacgcacggaggtgcaattgaacttacgcgagtgaggaacttagctgcggaaccagctaaacgttatagtgatagctcaatatatgagaacacaattgcaaaagttgcggcatcttatatacaagaagatgattctatttttattggcggggcttccattcataatgcgatgctgaaatatttaccggaagtatcatttacggttattacgaattctatagaaatagctggtcatctaagagaatataagaacatcgatacatatttaattggtggaaaagtaaagccttcaggaaatattactgatacatttgcctctgaattgataagtagattttctattgatctttatttctctacaggtggaggcatttcattacaaggtattagtactgcacaacacctgaagttgcttattttagtaaaagagtaagtgaaattgctagaagaaatatttgtttagctccgcataataaacttggaatagattgttttataagaggagagtctctaaaagaaattgaccttattataactgacgaagaggctagtaaagaaactgttcaggaatttgagaaacaaggtaaacaagttgtaatagcgccattatattgatttgaaaggagtttgacatgattgtaaaagagcaagagtatcatataaatggattaacttatacaattcgttctgcagctgaaaaagatgctgagcagttatcgaaaattagagttcagattgatggagaaactgaaaatatggatagagatgctggagagggatttatagatgacctagggtttcaaaaaataataaaaacagatagtgaagaaacgaagaatctctttttagttgtagaagtgcacaatcgaattgttggattttcaagatgtgaaggatcaaattttaagagattatctcataaagtggagtttggcgtttgtattttaaaagagttttggggatatagaatggggaagagcctattacaacaatctattaaatgggctgacgaaaatgcagtaaataaaatatctttacaagtattagagacaaacgagaaagctattcatctttataaaaaattaggttttgaagtagaaggcattttgaaaaatgacaaaagactatcggatggaaagtattataatacggtagtgatgggaagatttactaatacttttcatgaaagaggtgaagaagtatgttttacagaaggaagtactatgtagtgaaaaatgaattcatagaagtatttaatgatcatttcaatcacacgaacttacctaatcaattaaagcatggttctaggctaataggacgctggatgaaagataataagaatggtacgtctgaagtatttgccatatgggaatatgatagttatgaacagtataatgaaatagaatcgaaaattagaagtgacgagaggcatattaaaggaatacatgaatggtatgaaaaccatggcgggaaagaatatgttttacaggagtacatagtagagatgaaaaatgaagagttagtatgtactgtaaagtagcagaggggtgagggataagagaaattaaaacaaaattatattttagtttagcatccactattttatttgcaatagccgtgattgttttctttataaatggtaatccacaaaagtggttttggttatgtattttctttgcgtccattatacaaaatatagtgctactaaaaaagaataaagaagtgcattaagatattcaaattattaacatatttgtgtcgtcttgctagttgtattgaaaacgcttttattcagttttataataaaagtatgttttataaatctccaaaacaattaaaagggagatgatacaatgttagcttcaccgttttacttacatacatggaaaaagtttgttaatgaaggtgttcttgattcaaatcgcataaatcaaagaatttcagaatcgtggcatcgatgtaaacaggctaatgttaatcctcacatgaataaaggtcagaaaattttgtcttctaacatttttcaagaacaaaagaaaaagagtgaaattttccttgatatcgcattacctcaaatacaaaatatgagaaaaaccattgatgaactacaaatgatggcattattaatcgatccagatggttatgttctatcgttaagtggaaataaacaaacgttaaagcgagcgaaacatattaattttattgaaggtgtaaaatggacggaatcagctgttggcacaaatgcaattggaacagcgctagaaattgaagaagctattatgataagtggtactgaacattacaccgtggcatctcatagctggagttgtgcggctgctcccattcataatgatgatgggaaattaattggtgttctagatttctcgtgtccgattgaattttcgcatccatatatgctcggtatggtaacttcaattgcacatgcgatagaacgtgaatgtagcataagagttcatcaaaatgaattacacttaatccatcgttttttagatgtcattgatagtgatgaacaagtagttatttgtaatcatcgtgatgttatcgtttctgcgagtaagagcgttcgtgaacgaataaataattggtcaagaatgaaacttgaagagttaatgcaccatggattggaaactaaattagagataccagtatatagtaatgaaagaatgattgggaaatgtatgtatttaaaggaaaataaacaaatgaatacatattctgctctcacatttataaaagggattactttttcaggagttaccgggacaagcagagcatttcaacacacactagaagaaattaagcttgtttcaccgactgatgctagtgtgtatgtatgtggtgagacaggagtaggaaaggaatatgtcgcgagagcgattcatgaaaatagtccaagaaaagacgggccctttatagctgttaactgcggttctttgcctaaagaattaatggaaagtgaattgttcggttatgctgaaggtgcgtttacaggtgcgcgacgtcaaggatataaagggaaatttgaacaagcaaacggaggaacattatttttagatgaaattggtgaagtaccaccagagatgcaagtagcattattgcgtgttttacaagaacgcacaataactccaattgggagttcaaaattggtaccagtaaatattcgtattattactgccacacataaagatttactacggttagtagaagaagggaaattccgtcaagatttatattatcgtttgcacgtttatccgttatatgttccatcgttaatagaaagaaaagaggatatcccatattttatacaacacttttgcgaacggaagaattggaatgttgtatttccaaagagtatatacaatcaatttttacaacatacatggcccggaaatattcgggaactagtaaatgtattagaacgcatttacattttgtcgcaaggacgggaaatatgcgaaaaacaagtagattttttgttacaaacaatgaggggaaatcaacaacaacttgagttacaagttgaaaataaaacagaacatacattacattttcgcgaaaaaatacagcgtgatagcatgattgaagcattacaaaagacaaatggaaatgtttcgttagctgcaaaactattaaatgtaccccgtagtacattttataaacgaatgcaaaaatataagttataaagtagatttttgcaatctactttttctttgtgggctcatgttctgtcggaatgtgcgcttaccggggaaataatagaacagttagaaattaatttccgaaagggggacttatgtgaagtatattgaaattggcttcggaaataggtggttcgttcgaacagaaactgaaaataaagatggaactgaatttgaggaacgaggaattataaaacctatttattttgagtctttatatgtacgaatttggtttcggaaaacgtgttttatttttgatacgaaagaagggtttaaaaaaactaagaagaggaggattgaatataaatttatagttggaattgtaagtagactgaataaagaaaaagtgtgctgatatacgttattatattgaccaggaaattctttggacttatattaaattcataaaaagcaattttactaaatataaattgttaataaaaccactaaaaattattatcaagacctaaaagctaaaaatcctaaaaaaataaaggtgagcgcatattagtcatgtataatatgtactcacctttattttcttgttcaaagcacccgttagtcactcatggaacatggaataaagtgtggtattgatttaaaataaagtttgataatttataaaaaagattgataaaaccctgtattaatataagatttttctttcgccccttaaatttcagttgtattgttcaattaaagggccagattgttgaggaaacaggaataataagaatactcaaaagattgtttgtgaagtgctacacttaaactaacgggcagtttagcttaagtacattttttcacaaatttaaagggggatatttccccattttttataccagcttaacgttgattcgggaatgttgaacttcgctacctgctaattgaattctacttcatctggagacctttaaattaaaatgtttcctttcttctgacagacttattaaatttcgaaaacaatcaattcaatcatcttttcgtatagaaaaacttattaagaaacatgcactagaaaaaatataaatcatatataggagatatcccgtttgaatgcttgaggaggatattatgaaacctatgttacctagtgaaaaatatttcggtaatttagaactagtttatgcattttatggggctatgcctacaggtgttactgtttcagaaaccggtcgtattttcatttgctttccgaaatggggagacgatgttaaatttacggtggcggaaatttttgaggataaattgcagccttatcctaatttacaaaccaatttggttaatcccgagaatatcccaatgactttcatcagtgtccaaagtgtagttgctgatggaaggggaacgctttggatattagatacagcggcacccaatttttctgaacctattaaagggggggcaaaattagtcgctgttgatttagaaaccaatacaataagaaaagtatatacctttacagaagatgttgtcctgcctacaacttatctgaatgatgtccgttttgattttcgtgttggaaaagcaggttatgcctatataacggattcttcttcaagaggaccaggagctattatcgtcgtagatttatcaaatggaaacgcgtttagacggttaaatggagcaaattcaacttcacccgatccctattttttaccgaaagtagaaggtcaaattttaatgaatcgaaacaaagacggttcaacttctccatttaggttggcgtctgatagtcttgcgatttctcccgatggaaagatattattttttgctccactaaccagtcggcatttgttctcgatctcaacagaagccttgagagacagaacgataccggacatgaatttaccttatcatgtggagtattggggagaaaaaggtgcgtctgatggaatgatcaccgatgcaaagggagctgtttatgctggagattatgaaaacaacagtatccgtaagatattgccaaatggcataatggaagctatcgcacatgatccgagaattttgtggccggatactttttcaattggtccggatcaatatttgtatgtcattgtgaaccaattacatcgacagcctagatttcattatggaaaagacttacgacagaaaccttatagtttacttcgtatcaaaattgatgaatttcctgctccgacctcttcataataaaaatagtcaattaattgttttcattgatagaaaatgatcaaacttttttataaaaccaaaacataaacctgctggataagaatccattttgatcaatctttttcaaaatggattctttttatttaccatagaatacgggttaaaacgatatttttaatcaaactttattttaaaattacgaaggaactcatgaatgttttaaaaaatatggtgaagtagtaataccccaacttatgagtgaaattaatgaaaagttaaaatgggatgttatttcaaatgtataaataaaggtaaagaaataggcgctgaagaaattgaaaaactattagcggatttatcaccagaacaagtaaagattgttttttatcaagaaagtaaggaatatgtaaaaatactaaatcaaactgattataatcaaagaagtaaattagaagaaagtgaattaaaagcaattctaagtgaaatgaaagaggaggaaataatagagtttttaaaatttgaaaagaattcattgatgagatggacttcaattagtattgcttgggatattattggaaatcgtggtgagatttctaaggacattgctgaagaatttactgaaattattttaagtagattagagagttattcttgggaaaattcgggggataagcattgttggaaaaattaaaaatatattaaaagaagatttttatgggatttggcggaatataatataaaaaatcttgatgacgatgacaattattatacttgtagctcgaatatggagtttctgttgcaatacgcaggagatttattatttatagatattgtgaaatatatgttcgatgaagagttgaaatgtcactatatgtggctaactggatgtggatatataagctttaattttgaaattgctccttcaactagctatttacctcagcctaaagatattaaagaacttgtttgtaatattctatttgaagatttttcattgaaaatctcaatagctctttcatatatttctttatcaacacaaaatctttctgttatccaataattaagttcagaagatgtaatgatttgttctcttttcttaccttggaaatatcgttttaaaacattatcattaatagaagttggaataccatcgatataaccgaaaatctgaattttctttaatacaggagatgtatgccaatcgttagaccttgaaataagttctttcatatttgataagtgtattggttcttttactttttcttgatgagctttaataagctcatttaaaaactttaagctagtaggctgttttgtcgttcctaaaaatgataggaagctatttactagttgtacttgggtcattttcttatcctttctatatagaaattgttattggtattattatagaatatatgtcagaaaatacagttattcattaatggagtgggagagaattatatgtcgatgtcgctatattataaaaaaatccgggagcaattaggacatgaactaatattcatgccaagtgtagctgcagttattaaaaacgagcagggagaactcttatttcaatatcctggcggagaatattggagtttgccggctggagcaattgaacctggggaaactccagaagaagcagtaattcgggaagtatgggaagaaacaggattgaaagtacaagtgaaaaaacaaaaaggggtatttggagggaaagagtttcgttatacatatgcaaatggcgataaggtagaatatattgttgttgtgtttgagtgtgaaattactagtggaaaactgaaatcgatagatggtgaatctttaaaactacaatatttctcattttctgaaaagcctcctttagcactaccatacccggataatatatttttatagatgtaaaatagcacaccttatttattgaaggtgtgctatttatataacccggtcgtatacatctccgttaacgtatacacaatttcctctaagttaatctttttgtcattttgcataatagtccaaagaaacgattcattcatcgcgaaccaaccgcgtgctacaatctctttatttaaattaggttgtgctaatccactttcttgagagtaagtaatatcctgtttaatgcttgttataaaacgttcccgaatctcatcccatttttgccgtatttctcttgataatcctatcgcttcctctacaactcgcaaaatagcgcgttcttcatctgctaattgcaggaatgctctaacttgattttggatcattatacgtacttcctcttttgtttgtggagaaaaagagcgttcagcgatattataaaaacgattcataacatcttccattaaactaattaggagatcatctttgtttttgaagtatacatatgctgtaccatatccggtttctgcatgtttaataatttgtgtaattgtcgttttttgaaatccgttacgtataaaaatagtgtaaccagagtgtaatagtttcttcttcgtttctaaggagcggtgttttcttgatgaaagggtactgtttttcaaagaatcacctctttatactgaaatatctgaaaatataattgtattgtaaaagaagttcatatataaagtcaactgacataatatcattgacgttgtatcaattaaggtgatatatttcaattagttagaataaaaagaaaattaagagaaggtgacaccatgtataaagaaccatttcaaccaacttatgagtatgcgcttgaatgtgataaacatgatgaactgaaagattttcaaactgaattctataaaaaagaaggtactatatatttagatggaaactcattagggctactttcaaaaagagcagagaaatcattacttacgttgctagattcgtggaaagagtatggtattgacggctggacagaaggtgagcatccgtggtttttcctttcagagaaattaggtaaacttacagcccctcttattggagctttaccggaagaaactattgtaaccggttccacaactgcgaatatacaccaagttattgcgacgttttatgagccgaaaggaatacgtacaaaaatacttgcggatgaattgactttcccatcagatatttatgcacttcaaagtcaaattcgtttaaaaggattagatccagaggagcatttagtaagagtgaaaagccgagatggtagaacactttctgaagaagatattatccatgcgctggaagatgatatcgctttaattttattaccttctgttttatatagaagtggtcaaattcttgatatgaaacgtttaacaacggaagctcataaacgcggcattcacattggatttgatttatgccattcaataggatctattccgcatcatttcaaagattgggatgtcgattttgctgtttggtgcaattataaatatttaaatgcaggaccgggtagtgttgcaggcctttatgtaaatagtaaacattttaatagactgccaggattgtctggatggtttagttctagaaaagataaacagtttgatatggagcatacattaacagctgccgatcatgcaggtgcttatcaaattggtacaccgcacgtattaagtacagcacctttaattggttctcttgaaatgtttaaagatgctggtattgaacgtttacgcgaaaaatctttacatattacaagatatatgctgaatttaattgatcacgaattaaaagatttcggatttacaattggaaatccattagaggatgaaaaacgtggcgggcacatatatttagaacatgcagaagcagcacgtatttgtaaagcgctaaaagcaaatggagttatccctgatttccgagcacctaatggagtaagactggcgccggtcgctttatataacacatatgaagaagtgtggaaatctgtacaaatattaaagaaaattatgaaagaagaagagtataaacagtttgaaaataagcgagaggttgtggcataagcatgaaaacatcagagtggattgatatttcacaaccgctaaataatgatattgcaacgtggccaggagacacaccgttctcatatgaagtttcatggtcaaaagaagaaagtggctcggtaaatgttggaaagttaacgatgagtattcatacaggcactcatattgatgcaccatttcattttgataatgatggaaagaaagtattggatttagatgttcaagtttatgttggcccagcacggattattgacgtttctaatcttgaaagcatcgggaaaaaggaattagaaagctttcatttagaaggtgtagaacgattattattacgtacatcttcacatggaaaagctgaagaatttccagatgtgatccctcatttacgtgcagacatagcaccttttctttcggagaaaggtattcgtttaatcggagtagatgtaccatcagttgatccgctagatgataaagaattagcagcgcatcatcaattatttaaacatggaattcatattttagaaaatgtcgtactagatcatgtagcagacggtgattatgaattgattgcattaccacttgcattaactgatgcggatggaagtccggttcgagccgttattagaccaatataagtagaatcatataaaaggggcgtttggctaatatgaaagaaaatgaaaaagtaattatggaaaaagggattcatacggattttaaagagaatatgacgtatggggaatatttacaattagatagtttactatcttctcaaaaaagattatcagaccatcatgatgaaatgttatttatcgttattcaccaagcaagtgagctttggatgaagctcattttacatgagctaaatgcggcgattgaatctattaaacaagataaattacaaccagcttttaaaatgttagcacgtgtatcaaaaattcagtctcaaattattcaatcttgggatattcttgcgacattaacaccatcagaatatattgagtttcgtgattcactcggtcaagcttcaggttttcaatcgtatcaatatcgtatgattgagtatgcacttggctataaaacgccacatgcattaaaaatttatgaaaaggatccagaattacatgcacgacttcataaagcgctacatgcaccaagtctatatgatgtcgcgattcaagcattagtaaaagaaggattccctattcataaagatgtgttaaaccgtgatattacgcagccttatgaagaagatgcaacagtagaagcagcatggttagaagtgtatgcggatgtgaaaaaatattggaatttatatcagcttgctgaaaaattgattgatattgaagactggctacaacaatggcgtttccgtcatatgaaaacagtagaaagaattattggacataaaatgggtacaggtggatcctccggtgtttcttatttaaagcgagtacttgatcaacaattcttcccagagctttggaatgttcgtacgaaattataaaaataaacctgtcagttcattatggctgacaggtttatttttatttgagcacaattatgtttaaaatgaaggaacaagatataataaatggattaactatttaaatggaggtaaagtttttggatttcaagcaactagaaaataaattcgaaaagaaaaaagtgaatacatttcttgtttatcaaaaaggacaattaacaactgagtattataaaacacccgaatgtgcaaataacttatataaaataaattcgattacaaaaagtatcgtatctttattaattggtattgcagttgataagggctatataaatgatatacatacaccgatcacagagtggattgaaaatgtacctaggggaaaacataatttaacactatatcacttattaacaatgactactggtgaggactggaaagagtttgggaatggagtagtattcccaaatgactttgtagaatcagagaactgggtacagtacatattagaaaagccaataattgaagaacctgctacaaaaatgaattataattcaggttcttctcatttactgagctatattattcaagaagctactggaatgtcgacagagcggtttgcaaagaaatatttatttaatccattagaaattaacgaatacgagtggcaacaagatccgcagggtatatatgtcggcggcttcggtatgaaaatgaaatctaccgatttattaaaattaggaaaattatgtttgcaaaatggatattggaatgaaaaagaaattgtatcagcgaaatggttagaagagtcaagtagggcgcattttgaaacatatgaacatgtcggcgcatatggatatcactggtgggtattacataccgaaagatttcacataccgtattgtatatatttcgctatgggatacggcggacaatacatcgttatcattcctcagttagaagtagtagctattataagtagtcatatgccaaaacgtgggctcgttccattaaaactatttattgagcatgtacagggaaattctaattatatataagaaaaggagggaatgtatgaagcatgaaaaaattttatctttatttagattctgtttaagtcttctagtatgtagcgccattattacgcaattcataatcagggcacaagtgaaaccgttcaatccagttaacttttttagtttctttactatcgaaagtaacattttagttgcatgtattctccttttaagtagtatcggaacagctacatttggtcgctcagagcagtttagtatacttcgtggtgcggcgacggtatatatacttacgacaggactcgtttattttttgttactaagagggttagaagagtcacttcaaacggcaataccatgggtaaatactgtgctacattatatcatgccgattataatgcttttagattggattttaaatccacctattaagaaaatcacttggaaacaagctgcaagttggcttttattcccgtttttttacgttgtatatagcttaatacgtggtccaatcgtgaattggtatccatatccgtttttagatccgagaataggtggatatggtaaagtacttttatacagtatagggatagcagttgtaattggtgctatttgtatattggtaagatttttagggaatcgaaactttagaaaagaattttagaaatgcaagaaccccactgtgtctgtttttaacagtgggggtttcactttatccagctatttgtcgggctgcccgtaaaagtccgattggtgagggctgatgattagtgggagatgaacaaaacccccgctgattaaggtttcactttatctactcgtcttctgaaacgacaactttataaatttctccgtcttcgtttcaaattctacatcaacaaaaacaccgtattcttttccgttctcacgtaaccacaatttaaatttttcaacagttatttgaactgtttttggttttctacctatatgaagatagtcaataatttctgcttttgggtattgttctttcgtcttttctacggcaagtttaccccatttggcatacggcggctgcgcatgaacaattgatgagcctgtatatatatttgaacatgttgttaggaacagaatgacaagtgcgacacgttttaaccattttttcatgatgaactccttttatccttttttatattgtttacatattttttcaacgatattagtttggatttttttgtcttctttacataaaagcgaggcttttacaaaacataaccaagaaatcatttccgtaattaaggagggaaaattatgcgccaaaaagctatttttaaaatagcagttttacttgcgttcataggactgtctttaatggtcagtagtatacaattaaagaatgtagaggctttttctaatcaagttattcaaagaggagcatctggcgaagatgtcattgaactgcaatctcgtttgaaatataacgggttttatacgggaaaagtggatggtgttttcggatggggtacatattgggcacttcggaattttcaagagaaattcggattacccgttgatggtttagctggagctaaaacgaagcaaatgctcgtgaaggcaacgaagtatgacaagtcaactgctaataaagggacgacaacgaataaaggaaatagcggtggcactgcacaagagaataaaccacttcaaaataaagggacaaatgttccgaacggttattctcaaaatgatattcagcttatggcaaacgcagtatacggagaatcgcgtggtgaaccgtatttaggacaagttgcagtagctgccgttattttgaatcgtgttacaagtgcgtcattcccaaatactgtttcaggtgtaatctttgaacctagagcatttacagcggtagccgatggacaaatatatttaacgccaaatgaaacagcaaaaaaagcagttttagatgcgattaacggatgggatccaacaggaaatgctttatattatttcaatccagatactgcgactagtaaatggatttggactcgtccacaaattaaaaaaatcggtaaacatattttctgtaaatagagcggaggtgggacaatgttacgaggtattatcattgtattattaacagtcggtgtagtaggaacaggctattggggctataaagagcaccaagagaaaaatgcagttttaattcgagcggaaaatagctatcaacgtgcattccatgatttagcatacgaagtcgatttattacacgataaaattggcacaacacttgcgatgaattcacgatcatctttatcacctgcattagcggatgtatggcgtttaacatctgaagctcgctcggatgtagggcaacttcctttaacattaatgccatttaataaaacggaagaatttttagcgaatatcggtgatttcagttaccgtgcagccattcgtgatttagaaaaagagccgttaaatgagcaagaatataaaacgctacaaactttatattcaaatgcaggaaatatacaagatgaactaagaaaagtacaacatcttgttttgaaaaataatttacgctggatggatgtagaaatggcacttgcatcaaatcgcgatccagcagataacacaattattgatggattgaaaactgtagagaaaaacgtaacatcatattcttctacaaacttcggaccgacctttacaagtgcgcaaaaaaataaaaaaggcggatttgaagcggaaggaaaggcaatttctaaagatgaagcggcgaaaatcgcaaaatcgtttctgaatttaaaaggaaatgaaaaagtagatgtagagaaaagcggaaaaggtgcgaaagaatccttctatagtgtgaaaattaaagatgaagcaacgaataatgagttctatatggatattaccggaaaaggcggatatccaatttgggttatgaataaccgcgaaattaaagaacagaaagttagtttaaacgatgcaggtagtaaaggtttgaaatttttaaaggaccataagtttaataatatggagctttatgatagctctcaatatgataatgttggtgtatttacgtatgtagtaaatgaaaatggagtacgaatttatccagaagcaatccaaatgaaaattgctttagatgatggttctatcgttgggttctccgcaaaagaatatttagcgtcacatcaaaagcgaacagttccatcggcaaagctaactgcagcagaagcaagaaagaaaatcaatccggatgtaaaagtcatggaagaacgtaaagctttagtagtcaatgatttgcataatgaagtgctttgctatgaatttgtaggcactttaggaaaagatacgtaccaaatattcattaatgctaatagcggggccgaggaaaaggtaaagaaaatgcaagctgttgaaaaaatttatgattaaaccttaatagtgaagtggtgaaaataatgaaaactctaatatatatattgatgctttgcttcgttataactggatgcagtattggaaaaaaagacaatccaaacgaaaaaccggaacaaaaaaatgtttcaatgaaaaatgttaattatacgaataaatcaaataagccaaatgaaaaagcagcagatcatttagcatctttagcggcaagtgtgccaggtgtgaatgatgcaaccgcggtcgttgttggaaaatatgctattgtaggtattgatgtaaaagcaaaacttgatcgaactcgagttgaatcaattaaatactctgttgcagaaagtttaaaaaatgaccctgacggtgctaatgcagtcgttgtagcagatgttgatacgtatgaacggctcaaacaaattggaaagcaaattaaaaaaggaaaaacaggtgaaggtatactagatgaattagccgctattgtgggccgagtaatgccacaagttccaaatgatatgatagaaaatagagaaacgaatccaattaaggataatgataaacaattaccaaaagatgaagaacaagagttaagaaaagaacagaatgatcaatcaaataatcatttgaataaatgaaattagcctcgtacttaattgtacgaggtttttaaatataatattaaatattcagtttatttttaaggaaaaatatggtttaattatgatgggagggacaactgttatgatgaaaaaaagcgcatgtatattgtttggtttatgcttaggtttcagtatgacagcgtgtgaacagagaaaagaagtgaaaaatcaaacagcaacttcttctactgtgatggaaaggcaacagaaagagtctatcaatataaatcatttttcgagtataaatgaagggatgacttatacagaagtgaaagatttaattggttttgaaggagatttacttatagaagaaggggtagaacattctacacaaattaaacaaatttttgcttggaaaggaaacaatccaaattcatttgttgaaattacctttttagatggaagagtgcattcaaaagcacagcaaggtataagttaataagctaaaaaatgggagagtttagcatgaacatacacacaggggaaattcaattagttccgtataaggagaaatataaagaagttatacaaacatttactttaccaagtgaacaagttcagtttacatcagatccaagcgcattactggagaaagcaaaaagtgatcgtacaaaaaatgtgattgttattttagattacaatggggtaccggtgggtcttttcgcattggaaacgggagatagagtaaaggagttcacagataatgaggatgctttacttttaacatcattttctattaatcacaatagacaaagaaaaggattcgctaaaaagtcattgttattattagaagagtttgtacaacgttattttccaataaaaaatgaagttgtacttgctgtgaatgaaagaaatattcctgcacaaaatttatatgcaaaagtcggcttccaagataaaggttttagaagaatgggaccaataggccaacaaataataatgcatttgtctataatgaaataatgagatagaaaacttactcttgaatattcatgtagtaggtttttttattttaataatatacaatatatgtatataaaatgaaatagaaatgaaggatataaaaaataaatcaagatagaaaatggaatatcgttgggggaagagtgattaaaactgggattgcagtttttcttacagtgttagtttgtgaattttttaatatctcaacttggagttataaaaatgatttaaaagattataaaccaaatcattatcatcaccatttttcaagtgagtatattattttatttgaggtattatctattcatgatatgttagaagaattaaaacaaatatccgagaaatatgagtggggaaatcgattcaattgataagttcattttattgtggggggaatagtatgacactttatattgcattactaagaggaatcaatgtcggtggacataaagtaatcaaaatggctgagttaaaacgagtgtttgaatcaatagggttaaaacaagtgaaaacgtatatacaaagtggtaatatcgtgttcgaatctgaggaagatataaactttctaaaagaccgaatacaaacggaaataaaaaatgaatttgatttcgatgttccagtcatgctaagaacacatgatgaatttataaatattattaagcaatgtccgtatgaagttcattcattgttagaaggagaaagtgttcatgttgcttttttagcgaatgtactttctgaagaagagagtagtcaattgcttatatttaaaagtgaacttgaagattgctatatagatgagaaagtcgtttatttgtttttcaaaaatagcattcgaaattctaaattaatgaaccagtttcagaagttacatacaccagctacagttaggaattggcggactgtgaacaaattaaaagcaattgtagagggtatgtaaatataaaaagatgaggttttctacatgtagaaaacctcatctttttatttatattgttttgcaactacgagttcgacaataggataaataaagaaggaagagcaaattgcgatgaacagagggaggttttttactccatctaaattagcccccatagaaaatccttcagagaagattaatataaggaacattacaattacaagcacaaaatatgcaattttaaagcttttatatgtaatttgttgtcccatttcatcttgactttcttctgatacaccgtggggatctccccaagtaatgtaattaattaaattactaagtattaacgaaatagcaaaaattgtaccgcccaaaatagaaccttcagttatgtatttatatgtgccatgtactagtattgcaattaatgctaaaacaatgattataaaaatagtttttttagtattcaataaataattgccccctcgattgtaaaaaactctttacaaatataagtataaaattggaaaagtatcatgtcaaatactttttacacgaaatatgtaagtatgtaatattttagttctatgataaataaaaaattacaatacatttgaatgtaaaagaatgggctcgcatatatttggaagggatgtcagattaatttagggggtagttatgtctatacttttaaaagctggtgcagatgcaggaaacaacggtttgaagttaatggtgaaagggcaagaccctatttttattccgagtatttattctttatatataggtgagcctacaggactcttagatgaggtagatgtttcattatctgaattagaaaaccacattgatgtgactataagttctccatcgttaatgctaaataatgtacgatacatcgttggagaaaaagtcattcaagatcaattaaaaggtactgaggtagagaagaaatcaaataagtcaacggatgagttaatggttattacaatactatcaggtttggcggtaagcgctatgcgtcaaagtccaacttctagccatattaatattcgttatgatttatctgtcgctcttcctatgcagcttattacacaagaaatagctgctgaaaatgcaaaacgttatatgggaaatcataaggttattttccattatccgaacggacgcgatgtgacaattaatgtttcaattgagtattgtaaatgcctacctgagggtgcttctgggacgtggggcattgtatacgatgaagaaggaaatgttgtgaaacataaaatagaatgtgagcaaaatcaagtttctgaaattgattttgtagataaaactttactctcttttgatattggcgcagggacgacagaagaagtcgtttcattaggggtgaatttccgtccgcaactaagtaaaggtttatcttatggtgtaaaagagacgttactacaaatcattacgagatggaaccggaagtatccaactaaaacgattgatagcattacagaattcaatcaaatttatttaaatgataagcatccgagaaatacattattagttgaggaatcacagccagcgctattaggtttagcagcgcgtgttgcaacagatattataaataaaattgatgatatgaaagacgatccatacgtgtttatttatggcgggggtgcagtaattattaaaaacagtttaaaaatgattttaaagcaaaaaggacgactcaaaaatgtaatctttgtagataatccgttatttacaaatgcacgaggattattagtctatacttgttcgccaaaatatagagagcataagcaaaaagagttaggatttacaaacttaacgataagttagttggtggaagtatgcgatctaggcgatataaacgtggtgatcgagtaaaaatcaatattcataaatcggtatcacctgaaatgcttgcgtggctgaataaacaatcaaatccaactaatttcttcttctttgctgcacagcaactatttaaacaagtaggagatattgacgtttctaaagctttaccaagcagccatgttttctcattatatgtggagccttcatccttattaaaagtcgaagtaaacccttttaaaaacatgacactagacacaaatacatccactgaaaatgcaaaaaaaaaattatgggaatctgttgatcaattagattgtccatttttttaaacatagaaaaatataagaagtccccatcactatacatacgaatacagtgatggggttttgtttgtaaatggaaggggcacaatacaatttgtgacccttccattagttatttatctaaattttagatgtatgtttagaaacagcattaattatgctttcccagtcatctggatggttttcatggcctgcccctttaagggttaatagtactgagtttggaatttcatcaattagtgcgaggccatgttcaaatggtagtgctgtatcgtctgttccgtgaataactaatgtaggtgcttgtatggattgaagtacaccttcatatgcatcatcaccttgaagtaaagcgtgattaaacatacttaataaattgtttgcgcgttctatttcttgttttacttgtttataaactctattttcatcaaatattcgttctgatccacataatagacgagatcctgaaactaaatactctgccacatcatttttatttgcccaatctatacttgtgccatttacatgatgtgttaaaatcctttcatccattggaggtaaatcgcgagtattgtcatcagatcctattacactagtcgctagtaaagttagcgtcaaaattctttcgggatgttttacagcggcaatttgagcaatcataccacctaatgacatgccaaataggtgagctttatcaatatgataagcatctagtactccaattgcatcttcagccatatctgttactgtgtaattggaagttctaggttcataggcaacagagcgcccaacatcacggttatcaaagcgaataacaaacttccccgtactagccaacagctcacaaaactcttcatcccaataaaccatggaacatgtagcgcccataattaataaaatagcagggttcttagggttcccaaagctttctgtacatatatcaattccgtttattttaaatatcttttcactcatatagttagcctcatttcttttgaatttaattaataaaacaattttggatgattctaagatgtgtgtaagattcgtggtggaattcatcccgctatttgctggacagtaagagtcccatcttaaaattcagggaaagtaaagaagttgggaggggaccaacttcccgaaaaagcccgattggcgagggttgattaaagtttcactttataatgcttcttgcataattacccccaaaaataattatatgttaattcaaggcaaaaaattttgagaaataattgtatgttattaaaataaacagcaaggaggagaggaaatgaaagcaattgttattgatcaatatggtattgttgaagaattaaaagaaagacaagttttaaaaccggttgttcagaataacgaaaaagctcaacaataaataatatcccatactatacattttcattttcgagtattatttattgttagctattgttagctattgtgatattacttctaacaaatactgtttcgtattgtatcgtgtaatttttctaatccaatttccatatctttctcgtttaacattgaatagctaattcttaattggttatcatttgtttcgtaatttaatagacaagctgttcctggtaaaaaagagacatctacttcatttgctttttgtaataaggtaaagggatctatcgaatcaggcagtgtcacccataaattaaaacctccatttggtatttcaaagtgtagttcttttaatggcgacaatatatcaattgttaaatcacgtctcatttgtaaagctgtacgtaatttttctaaatggtttttcatacgttctgcacgtaaaaatggtagaagtgccttctgtgttaataaaggactaccgatatccatcgaaccttttactgcatatagccattcaaaaatagggccatcggcaataagtgctgcgatacgcagtcctggtgctaacgttttactaaatccttttatatatattacgtggccatctttatcaaaacttttgattgggggcgggactatagcatcctcaaaatatatttctccgaaagaatcatcttcaataataaaaaattgatatagctccgatagttctataagttccattcttcgttctttactcattactgtacctgtcggattctggaaggtgggattcgtatacaataaaacgggatttttactttgacaaatatcatcaattaagtcggagcgaactccatgattatcaagagaaacgggaatgatttgaacacctttattgatgaaaatatcaagcgcagcactgtaacatggactttctactaatacaatatctccaggttttaataatgtttgagcaattaaatcaattccttgttgtgcgccgcttgtaattaataattgagatgggtctgtcactaatttctggtgttcatttaagtaatttgctatttcaactcgcaattcataatcgccttgaactggcccataagttgctaacaacatcggatttttatccagcaatttatgcatttcatctgccaaaaatggatttggtaacagacgaggatacagaattgcttgtgaaaaattataatatttacggtgcttattcattgcatattgagaacgcataacattaatcgttttcatttgttgccatttatacggaattggtttgaaatctttctttacccgtttatatatgtaagcaccttttccttgttcgatgcgtatataccctttcgtttctaactgtttatacgctttacgaactgttaatacattgatttgtaaatctgtggccatacaacgtaaagaaggaagagattcaccatgtgaaagcataccactttgtattctgtcaacaatttgcatatatatttgcttgtaatacggtatgtttgtttctttacgcaatacaattttcataggttcacctatttttctttttaacttaattaaagcgaaaaatatatagggaatcaactacaacttgaagtaactgttatatgtaccgatacactgttatacaccatagcctctatactcattctaagagtaaaaaggaggaagcaaaatggtcatttttaattacattttagtatgtattattttcgggacaacatttttaacgataaaaattggaattgaagcaggggcgccaccgttgttttcagcaggaattcgcttctttttagcgggcataatccttatgattatttttaaattaaagcgaaaagaaattatgccacatatattttcaaaacgcattatgtatgctggattttgtttaacatttatgacattcgcaagtttatattggtcagaacaatatatttcttcgggattagctgctgttctttctgctacgggaccaatgatgattttattaatacaagcaaagagggatagggagaaattacaaatggaacaactcgttgctttagttattgcactagcaggtgttatatttgtttctttaccaggaatgcatcaacaagtaagtttcatatggagtattgcttgtattgtgttagttataggggagttattttacggaataggctctattcgttcgaaagaaatactgtcagatttatcaaatgtatcaccatttcttattaacggtattcaaatgttttatggagggattttactactaatcgcatctattattgtagaacaaccaaatgtaaccgtattaacttcatggagtgtgcaatggcctattttatatctcatatttatcggatcgattggtggacacggattatattactggctcttatcaaaaacaaatccagtatttccatcgacgtggttatatgtatcaccattaattgcaataattgtgggatatatcattttaggagaacctttaaatcctacaatgggaatgggggcttgtcttatattgattggtgtatttttggccaatcgttcaacactacggacttatttcaaaaaagggcggttattagagaaggagatgtaatttaataaagcaatagccctgtatgttacaggactgataaaatcaaaaacacagttggaaaaataaccaactgtgtttttaataattaattcacttttttaataaagcctttataatgacgttttacaagctggctttctaacgtcttcatagtttctagtgctacaccgacaatgataagtaagcttgtaccaccaatttgagcagaaggtggtaacgtagcaattttcgtgaatacgagcggtaatatagaaatagcacctaagaaaattgcaccgataaatgttaaacggtatagaattttagttacatattgttcagttgctttaccaggacgaataccaggaacatatccattttgctttttcaaattctcagccatttgttcaggatttacttgaataaatgcgtagaagtatgtgaaagcaacgataagaccgacataaagtgtcattccaattggatgtgcgaaatcaagatttgcaactaaccattttgatacgcttgaatcagggaagagctgtgcaattgtacgcggcgtcattaaaaatgcagaagcaaagataactggtataacaccagcactatttactttaagcggtaaatgagtgttttttgctccttgatattgattgtttcctgaaacagcttttgcatattggatcggtattttacgtacagcttgttgaatgtaaataacaccaacaactatcgctaaaattacgagtccaattaaaacaatttttattatgtgcataaatagctgatcgccagcattttggaattgttgtaaataaatttgatttgcaacatttggaatggcggcaacgagacctgcgaagataatcatcgaaataccattaccaactccgttagcggtaatttgttcgcctaaccaaagtaaaaatgcagtacctgcagttaaaactgtcgcaataaataagtatgtagtccagctttgatctgttattaattgtccacctgctatattattaaagccataagacattccgatggcctgtatgaatgcgagaatgattgtaaagtatcgagtgaattgagctgatttcttacggcccatttctccttgctttgcccattccgaaaatttaggtataacatccatttgtagtaactgtactatgatggaagctgtaatatatggtgtaatacctacagcgaagattgagaagtgttgcaatgctcctccgccaaatacgtttaacatacctagaacgttagcttgatcttgtacttttaatacctctgcgttagtatgaggaactggaataaacgtgccaattcgaaaaacgattaacatcgctagtgtaaaaaggattttccttcttatctcagctactctcatgaaatttgaaatcgtacgaaacattatgtcgcctcctatatttttatcagtaaaaaactgattattataccctatgaagtaaccacaaacctccttccgcactaaattcatttgacaaatggattttcatacactttgtagttttcacggatataaaaatataaggtgttatataagcgacctatacacttcacgtaatcattcaatacccataatatatcgaataaattaacaaatgtacatacatacgcattaaaaatgaataaatagggttattttttacatttatttaatgataaattgataggacattatactggtaaatgcgcttcgtatattcctttaatcaattaaaatcctccacctttttattttcttacaattaatatatcgatttaaaaagaatttaaaatcaaataaaagtatgaaagtacatactactttagtagtagtaatagtaatcaattgtatttcaattaaaattcatgtgattagaggattctttttatttaagaaggaataaatatttaaagaaagctaaataaacagtgtacatatttataggggagaagatgtaaatgaaagtttttataaaaaaatttccaccattagaagtagcatatataagacgaactggtagctactttgaaccacaagatcactggggaaagttactgaattggtcaattgaaaataaactttatccaccagagcaatcatttatcggaatatcattagataatcctgaacttgttgcaagtcataagtgccggcatgatgcatgtgttacgattcctgaaaacttcgataaagaaaagcatcatgatgtgcaatttaaaagattagatggaggtacatatggtctataccagttctatgatgaacctcataaattaagtgaagcgtatcaatacatgtatgcagagtggctaccaaatagtgagtatgatgcagattatgatagagataatttagagttttgcttaaataatgttgctgaagatctagacggaaagttaaaggttaatttatttgtgccaattaaaaagatataaaaaacaaataatttcatttgtagctttaaaatgaaattggaatagtagtgaaagaaaaactttttttgaagataatatttctagcgtaggaatttaagtatgtaggttgcaatgaaaggagaatccacatggatacatttgtaaatgacaagttttataaaacgagagatcaattagttgaggaaattaatttgttgagtgatgctcaatttaataggaaaccagataaggataaatggagtattgcacaagtttgtcatcatttagttttattagatgagagagttataacagttatttcatcaggattaaaaaagttagatagtacccaaaatgagcgtaaagaaattcacactattttattagatagaacgaaaaagtttatagctccagaaatgattgaaccaagtatagaaccatttgaagtggagcaaatgctcaatacgctaaacgaatcaagaaaagaattgatgcgtttcctgagtacaatagaagatgagtctatattagcgaaaaaagcagtgatgcatccagctcttggagaattatcccttgatcagtggatagaactgatttatttacatgaacagcgtcatatttcacaaataaaagagataaaattactttgtgaaattgaaaagtaaaaatcattccctatttattgatgcgtattataaacagggaaaacggttgattcatattgattcagaagaaaacaaaaatagaatgaaattagttgaaagtaaccaataagcttaagaaaatatgaaactatccgattttctgtataagtgtaaccccgtcttaaatgaagagcggggttatttttttggaagtattttcattgagaaggaaatacttcgacaatgaaattcaaaaaaataatcatcataacatattttatatgcgaattttagtaaattgaaataatgattttatgatgatgaatgatatgtccttattttgaaagtactcttcacacgcttaaggaaggggtattctgtcaggaaacgataaaatacaattctgttaggggatgtatgcaatttattctctttattttgcaacagaaccaccttcaaaattatcttttgtagttgaagtttcctgaataataagttacatttttaaagttcaagcaactttatgaaagtacaaaaaggggagaaatattattattatgcaaaaaatgaaatggaagaactatgtatgttactttgtaattctattactgcttggaacagcagtaatagtcaaaccatctatctctaaggctgaggaatctgaagttaatatcacattgttaggtactgcagatattcatggtagatttatgccttgggattatgcgcttgatggagcaaatatgagtggaagtttgacgcagctttatacggttataaagaaggtccgtcaagaaaatccaaataccatattagtagatgctggggatacaattcaaggaaactcagtagaattattcaacgataaaccacaatcgccaatgatggtagcgatgaatacaatgggatatgacgcctgggcatttggaaatcatgaattcaattttggattagatacattgaaaaaagttagtgagcaatataagggaaaaacgttagcaggaaatatttataaggaaaatggagagcgctttcttcctgcatatacaattgtagaaaaaggtggaattaaagttgggattattggtatgaatacaccaatgattagtgattttgaaaaagggacagatcacttagagggtttagtggtgaaaaatccggtagaagagacgaaaaaggcaattaaggaattagaaggtaaagtagatgtaatggtaggagttatgcatatgggattagaaaatgagaatggtatccctggtactggtgttcaagatattgcaaatgcttgtccggaactaagcgctatttttgcggctcacatgcataaacttgtaaaaaaagaagttgtaaatggcgtaattattacagaaccagataaatatggaacacatatttcacgtattgaccttacttttacaaagcaagatgggaagttgactttaaaaaataaaactgctaccgctatacctgtaaaaaatgctgatggaacaacgatattatctgatcctacacttgaagaaacattaacatcttttcacgaatatgcgagaggagatgcaaatgttgtagtcgctcaattaaagggtagaaatcttgttcctgaaaatgaaataaagggtattccaagtgttcagattcaagaaacacctttatcagatttctttcatgaagtcatgctctactacagtaaagcagatgtagtagcccatcaaattgataatgattatgcccgtttagatacaggtcctattaagaaaaaagatattgcgtacaattaccaatatgccttgggagaaattacagtatataagatttctggaaaagatttaaaagactatatggaatgggcagcaggatattttaactcatctcgtgccggagatgtaaccgttagctttgataaaacccgccgtgcatctaaatacagtacgaacgatttctttggaggcgtaaaatacgaaattgacttaacaaaaccatatggaagcagaattacaaatttacgctctattcgtacaaacaaaccaatcaaaatgagcgatgttatgacgctaggaatgaatgcatatagaatggaggctcttcaggcaaaagggggagctttagaggggcgtaagtttgaacaaatttggtcatctaaacaagagaatgcatttggagaaacaggcggaaccattcgtaaccttgctattacatatttaaaagaggtaaagaatggtgtatacactccaaaagttatgcgtaattggaaaattactggtgtagatttacattcttcagagcataaggctgtagttgatctcgtgaataaagggattttagaaattccaaaaacagaagacggaaaatacacaaatatagcatctataaatacgaaagactcaatttcaaaagaagaaattgtagcactctcacaaaaagcaaatattaatccaaatgagtttaatcatgtaaagacaaaaggtgaattttataaaaaacttaataggattactaaaaaaatataaattataaggtttcttatagtaattgttattttaatagcattaaacccactcttacaatagtaaagagtgggtttttatgttgttatttagatgtaagtatacttttattagaatgaatatagataattaataactaaccaattggatgagcgtttataaggattctcttttattcaaattaatgtacatatgtgttccgttcattatttataatattgaccacaatttatgtaattttgcataatgttacataaatttcgtattttctcttttttccgacaaaaatagacagtatactttgtacaagctttctatttcaaaaattatacgaggtgaaataatgaaaaacaaaaagacattaactaaggtagcattaacaacaggattagctttaacagctgtggcaccatatggcgtaggtcatgcagaggaaacagatcaactacaagtccaaattcaagaggaatcgttccgttcgggtgaacttacacaaccgtcacaaaaggcaccagaaaatgtagtaaaggatgcacttaaggagaaaacagagcaagctctgtcccaaaaacaagtcaatggagaagcaggagtagattataaagttcttcaaaaacgtggttcgtatgatggaactacacttgtgcgtatgcaacaaacatacgaaggaaaagaagtatatggccatcaattaactgcacacgtagataataatggtgttattaaaagtgtttcaggtgatagcgcacaaaatttaaaacaagaagaattgaaaaaacctattaatctatcaaaagatgaagcaaaacaatttatttatacgaagtacgggaacgatctcaagtttatttctgagccagaagttaaagaggttatttttgttgatgaaaataatggacaagctaaaaatgcataccaagttacctttgaagctgcaacaccaaactatgtttctggtacttatttagtaaatgcacaaaatggtgatatgttaaaaaatatggtacaagaatctaacttaaaagccagtgacaaactagttggagctttaaagaaaagtaaacaaagcagtcttacatcattaactggaacaggaaaagatgatttgggtatttctcgttcatttggtatctctaaacaaagtaatggcaaatatgctcttgctgattatacaagagggcaaggcattgaaacatatgatgtgaattacagagatattactaaagaagaaagctattatcctggtacattagcgactagtacttcggcaacatttaacgatccgaaagcagtaagtgctcattacttagcaacaaaagtatttgatttttataaagataaatacaagcgtaatagctttgataataaaggacaaaaagtagtttcagttgtacacgcttgggattctgaagagacgaatgatccgaaaaattggcagaatgcattaagtgctaataatggaagtatgcttgtatatggcgatcctattgttaaagcatatgacgtagctggacatgaatttacacacgctgttacttctagcgaatctaatcttgaatattacggagaatccggtgcgattaatgaggcattatctgatattatgggaacatctattgagaaatacgtaaataatggaaaattcaactggacaatgggagaacaaacgggatctgttttccgtgatatggaaaacccagcttctgttccatcttcacttggagtaccttatccagatgattacagtgaatttaacgattttaatggatgggatcaaggcggtgttcattttaattcaagtattattaataaagttgcgtatctcattgcgaaaggcggaactcataacggagtaactgttaaaggaattggtgaagataaaatgtttgatattttctattatgcaaatacagatgagttaaacatgacttctaatttcaaagaattgagatcagcatgtattcgagtggcaactaataaatatggtgcgaatacagctgaagttcaagcagttcaaaaagcatttgatgcagcaaaaattaagtaatttagaaatatagttctcattcatatattaatacattatgaaaaacagctaatgtcattttaaggatattagctgtttttttcatagcaatgtattattgaaaataaactgactaagcaataatgaggcgctttctctttaagaagtagtgacaaatcaataaggtttaaagtgtataaaaacagaaaattaataatatattgacctcttgatagaaagtctataaaatgaaagcgataacaaacgattgctttaaaatgatttccctgatcttttagtatttacaaatatatgaaggcataaacaaatctatttttttaagcgttaatgcaaacgctttcgtattaaaaggtcattgaaatacatacgtgaaaatagccaatatggaggtgaagttaaagagatttctagataaatttaagcagttttattcagtgaaagcataataaatcgttagtaatatttgaagaaagggtgtatgtggtgcaaattacaaaaagattaattaacaaaacagttttattacttactttaatcattatgttatcatctgttttctcttttcagagtgtgaaggcagtttcaaattcgaaaacaactgaaattatcattcattacaaagaaaagcttggaaatacaaaagactggaatctttggttatggggagaaaatgcaaatggtacatcttatgaatttactggtgaagatgaatttggaaaatacgctaagataaaaatagacggtgactataatcgtgtaggatttatagttcgaacaaatgaatgggaaaaagatggtggggatcgttggattgaaaatataaaggacggtcgtgctgaagtatggattctttcgggtgatgaaaaagtatataactctaagccttcatcggatctctcaattcaaaaagcaactattgatagtttcaatgaaattactgtaacgactaatgtcccgtttcatattaaggaaaagaaaattgaaattgaaggcattaaaattaaaaatattactccttatgatacaaacagtggagatattactaatcaggttaaaataattacggaacagaaaattgatttaaaacaaacatacaaagttaaaattgaaaacttagctgatacgaatactgaaattggtaaagtcattcgtagcgaagaatttgataatttattttattatggtggcaacgatttaggaaatacatatactccgcaacatacaaagttccgtttatgggctcctactgcaagcgaagcgaagttagttacatataaaaactggaacgataaaataggtgctgaaataaacatgcaacaaggtgaaaagggaacttggacagcagaactaaaggggaaccaaaaagggctcttttatacgtataaggtcaaaattggtgataagtgggctgaagcggttgatccatatgtgcgtgctgcttctgtaaatggcgataaaggtgcagtcgttaatttagaagaaacaaatccgaaaaaatggaaagcaaacaaaaagccaaaatttaaaaatccggaagatgctattatttatgagttacatgtacgcgatctttccattcaacctgaaagtggtattaaacagaaagggaagtatttaggtgtaacagaaaaaggaacaaaagggccaggaggtgtaaaaacaggacttgatcatataaaggaccttggtgttactcacgttcagtttttaccgatatttgattatgcttcagtaaatgaagagactttaaatgaaccgcaatataactggggatatgatcctaaaaatttcaacgttccagaaggctcctattctacaaatccttatgagccaactgttcgaataactgaattaaagcaaatggttcaaacactacatgataataatcttcgagtagtgatggatgtagtatataaccatatgtataatgctgctgaatctaattttcataagttagttccaggttattattatcgttacaatgaagatggaacatttgcaaatggaactggagtaggaaatgatactgcttcagaaagaaaaatgatgaggaaatttatgatagattccgtaacatattgggcaaaagaatacaatttagatggattccgttttgatttaatgggtattcatgattatgaaacgatgaatgaaatacgtaaagctgttaatcaaattgacccttctattatactacacggagaaggatgggatttaaatacacctcttgcagctgagttgaaagcaaatcaaaaaaatgcagagaaaatgaaagggattgctcattttaacgataatatacgtgatgggttgaaaggtagtgtatttgaggaaaaggaaaatggttttgtaaatggaaagcaaaacatggaagatcgtattaaaaaaggcattacagcaggtattgactatgatacaaattcgtctacctatcaagatcctgaacaggtattaacttatgtggaagcacatgacaatcatacattatgggataaacttgagttaactaatccaggtgacagtgaagaaatgcgaaaacaaatgcacaaattgtcttcttcaattttattaacatcacaagggattccatttttacatgcagggcaagagtttatgcggacgaaatacggtgattataatagttacaaatctccagattcaattaaccagatggattggctgcgccgtgcaacgtttaataatgaagtagattatatgaagggtttaatagaattacgcaaaaagtactcagcttttcgaatgacatctgcagagcaaataaaaacacatgtatcatttattgatgctccgaaaaatactgtagcttatacaatagaggggaataaaaatgaatactttacagtggctcacaatgcaaatagagaagctgttgaaataacacttccatcgaaagggccttggaaagtactagtagacggcaagcaggcgggaagtaaaccactttatgttgtccatgacaataaaattaaagttcctgcattaagttcatttgtcttaaaaacagagaaaccgattaaataaaaacgaagaatgtggaaataaatactgcattgagcaaatttaataaggattgcaaatgaaaaaagcgaagtgaagattattctcacttcgcttttaaagttaatgtaatataatttcatatactgtaattatattacaatttaataaaagaaataagcaatagattatttcttttgtgacagtaggaggagaagatatctttgagtttatttataaaattacctgaaatacattcgtaatttatataatgtttattatatattcgaacatataacgaactagatgttagagttgtattaattcctacaaatcgtttaaaaataacaaaggcgtaaaaagtatatggaattaaaatagagaaaagacaccattcaaggtgtcttttctctattttaaatatgaaatgtaagtaactcgattgtatgtaatagtatgtgatattttcacactaactgattaagaaaaatttaaaactcttttcttaatctatttgtaataaattacatcataaaattttatcgatataataaataaaactttctcaacattatttgatttaataactatattcaaccgctctccaatccattacaataatttcacattggaaatacatgaatattctcaatgttataaatggtttataccttataggattactatgggaaaggatgtgaaatatccaaaaagaaatcattttttatgatgaaataaaaaattttaatgaagaaaaagttatttcattattttcaagtttcgttaaagtgcatgtatttataatcactatgagacaaggagcagaatccgaaaaaatttttgtaaattagaaaattgcatttcaaaaataagttaaacgtttatggagggttatatgagcgagaaaatttattactggtctccgattaagcattgggagaagttgcataatgaagttttgatcggggaaatgagatttacaggtattctgtctgagtggtttcctgatttttattttatggctcaaaaaggtgtgaaaatcagtgaactagtagagcgcttttcattaggaaatgtagaagagacacacaaaaacatagagctcatgataaaaaatcgtgtgttagtaagtaacatattacacccaagagaagtattttcttcacaagaaaagattttttcaaatccatatagcaaccagattcgcttttctaaagaaaagttagataagtatatgagtgaacaattaaatcgcacgcacgttgctgcacggtcgaccgaaattcaacttgaaacaacaaatgagctacctactataatcaaggaacgtaggtcttgtcgtcaatttgatatggaaaaacatattagtttttcggaattttcccgattcttatcaactctaaaacaggttagggaagaaaaaatatactatcattacgcaagtgcaggggggctctatcccattgatatctttgtttatgtaaaaccaaaacgtatagaggatatgaaagctggattttattattataacccatcaaaaaatagtcttgtgattgtaaacaacattgatcaagtaatcaaaagtgatcatgagttaattaatcaggatttatttactcaatctgccttctcagtttatttggtttataatgcgaacgcttccatcccgaaatacggttcagatggatatttatttgcttgtattgagtcaggcattatcactgctaccttaaatatggttgctgagacattaaatttaggggtttgttcagttggtcatatgaaatttgaagatattcagcaatttttatgtttggatagtcatcaagtgtttctccatgggcttgaagttggcttgaaaattaacgagtagaagaaatgaatattagggggataaagataaaaatgcacattaaagatcgaagttcgattcatgaaaataaagaagtagaagcgttttggaaggagcaattatcttccgaggttctcgatttttctgtatttaaatttaatagcgattaccaactaaataaagaaacaccttgtgaatacgttcaagtcatagtgaatgtagaatttagtaaaagtatacaaaaaataagtaagtctcaagatttattattatttagctggtttcaagccgctttaagggtttgtttggcacattatacagatcaagaaagaattactattggtattcctataattgaaaagaatcttgaacaaagtgagaatcttaataagttgattcctttaggaagtgaaatccagccgcatcacacctttaaacaattagtaaatgagattgaacaaacgactttattcgggtatgaaaatcaggagtatccgctctctgaattattagttaaacacaatttaactccttttcaaattgtaatcgggatggaaggattacataatgaaaattcgctagaagaatacgcagagaataatttagccctatggatacgaagaaaatggaatgaaatacataatgaatttgaatttcaaatttcttgcaagtcccgttcattctcttctttgcaacagtttgccaattcgtattgttatgttttaaagcaagtttcacaaaatccgaatttggcattgaaagatatttgtattattgcagaagaagaaaaagagttgttagaaggattgaatacttttcaaacgggcatagacttgtttcaatcatttcaagatttgtttgaagcgcaagtattaaaaactccagatcaaattgctgttgtttgtaatgatcaatctttgacatatagagaattgaataagaaagcgaatcaattggcttctattcttcaaagtaaaggtgtttcaaaagaaagtattattggtgttatggtagatcggtcattagaaatgattattggtatgatggggattttaaaagcaggagcagcgtatttaccaatcgaccctaactacccaactgaacgaattgaatatatgttacaagatagtcaagcaaaatatttacttagtaagcgaacagaggaagtattgccacaatttgcaggtgaagtactgtatcttgataaagaatatctttttcaaggtgaagaaagtaatttagttcgagaacataatcctaatgatttagcttatgttatttacacatcaggatcgacaggaaatccaaaaggggtaatgatagaacaaaaatcgctagttcattttttaaatgtaatgagagaaaaagtaaaagctaatcaatcattcttgtttcttgctagtgtatcttttgatatttccttgttagaaatatgtcttcctttaacgcaaggttcaaaagtagtaattgctacagaggaccagtttgcaacaaaagaattgtctcatttggtcaaaaaacataaggtggatttatgggaatcaacgccatcgcgaatggaagtgattttgagtgatccagaaggggcgatttttctaaaagatttaaaatctattttattagcaggagaatcattttccattgatttggttgaaaaaattcgttgtatcagtgaagcaacaattttaaatatttatggtcccacagaaacaaccatttgcgcaacagtaaaagacttgagcacttccaaagaagttacgattggcaaacctaacccgaattatcattcctatatattgaataagtatggccaattaaaaccatttggaattcctggtgaactctgcattgctggcgtagcggtagcacgagggtatcttggtaaaaataaactgacagatgaaaaatttgtaccgagtccttttgcggcaggggaaatgatgtatcatacaggtgatctcgttcgttggttgcctaatggagaacttgaatatttaggtagaatggatcatcaagtgaaaattcgggggtatcggattgaattaagagaaatcgaaactcaattaagggaatatccagaaataaaccaggctatcgttgttgatcaagtatatggaaataggaaattattagctgcctactatgtatcggataacaaggtgtcttttggtgaaatcagaaaatatttaagtgataaattacctgagtttatgattcctgaaaaaatgattcaggtagaagagattccattgaatccaaatggaaaagtggatagaaaaagattgttggatataacacaaacggattatgtatcaattccatacgttgctccgcgcaatgaaattgaacaaaaattagtgcgtgcatgggaaaaagttatggagattgagggaatcggtattcatgataatttttttgcattaaaaggagaatctattaaagcacttcaggtaattaatttattaagaaaagactgcttaaaaataagtacaacagatttttttaagcaccccacaatcgctcaattgagttcttgtgtaaagttagagcataaagaggaaaaccttgaaagtagaccaactcatgttaaagatttgtctaagccattttccttaacagaagttcagacagcgtatatgataggacggaattcacagtttgaattaagcggtatttcacctcaaacatattttgaatatgaaacagcattggatatcaatcgtctttcaaaaagttttcaaaaggtaattcatcgtcatccaatgttgcgagctgtaattttaccagagggaaaacagcaaatattacaaagcgttcctgattacgagattgaaatagtgagtctcatagatttagatgataggaatcaacatgctcgcttacaagaagagcgttctcgaatgactaaccatgtattccctttggggcaatggcctttgtttgaattgaaagcttttcttttaaaagaagacacgtatttattatgttttcgatacgatgctttattaatggacggagcaagcatgaacattgttggacaggatttgttgcattattattataaaccaaatcaaaaattagaatctttatcttttgattttcaagattatatgtttatctatgatgaaatggaacaaagcgaagaatataaaacagcaaaagattattggacaagtaagcttcctgactttccgtttgcaccttctttgctgttaaaaaaggatccagcagagattgctactcgggtgtttttgcccatcccctcgaaaagggggaataagaaaaaataggatgtttttgtagatggagcgccagagttattcttttgaagaaaatttagccataaaaaatgcacctccaattgttagactgtgtctaacaattggggtgcacttcaaatgaatagaggactttttccaagtatattctattttaaagttcttacttatcttttactttaaaagatattgctgtaacttctttattaacagttccatcccgtttggacttacaataatcttcccattcgctaacgaaatattgctgtctgaaatatctcctgtaagtgcacaagctcttggagattgatattttcgtaaaataatctgatcctcttctataaacatttcaagagaatctttttctacaattcctaaactccgtcttatttccattggaataacaatacgccccatactatctgctttacgagtaattcctcttgatttcataaaatgccaccctttatatttatctaatattacggtattcattttagcaataaacaacaattaggaatagttcgtattacagtactttttttagaaataaataacaattaggaatagtttatgttaaaattctttcttgtttattcttgatttttaatatatttttccttgatcatttttatatattgttttctttcagttagttcaaatataaataatgctttttttatgtctgttaaaccaacttcattagagtgctgaactttcaataaaattgcacctttttcaaaaaacaattcacctaataagtataaagtattcatatttatggctaattttatacctatttcactatactttattgcttcttcatattgatttgcaaggtgtaaacattttgttaacgtatgaatgagtcttaatttgatttctttttctctaggaaattctatcttattaaaattaattaaactttgttttaatatatttatacttttctcatactcttcattttctgcatgtattatagcaattgaattcattatgcttatttctttttctgataaaaagttagtactacttaaggtttgttttagtgctctatttaaaatgtcaaaagcattacttgttgctccatttacataatatatagcaatcgcttcatgccataataaaaattgtttatcctctttcgattggaaattattatcatttttctctttttttactattttataaagctcattatattgtttttgttttacacaatctctcattacacattttacattttcaatatattttatttttttatttttggttagtgcgaatatataatttggatcaataccaagtctttcagataattgatacaacaatatgctagatggataaataatacctttttctatcttactaatttgactttgtgaacatattccatgacataattcagattgtgacatgttttttttctttctaagttctttaataataataccaagattgcagaattccatctttcctccctcaaatgtaacactttatgagtataagaatattttccaacttttaatgtaatgtaaaattgatatagttacaattactaattatatggatttatagtttcttttacaaacttgtatcacaatacgagaaattattaaaatatggttcactaataatcaatgtgcgttttattcacccccactgattattagtccaccccaggtaggcttttacagggagtccgacttctttgccacatctaaattttgaggtcggagtcttactacccgcaaatagccggattaaaataaatatgatttttcacctttatttcttttaatagtttcttttgatttttatataaataatttcgaaggagcgtattttatgaaaagaatgttgaccgaaagagagttagaagtggctatttatgtagcaaaaggatacacagatgcagaaatttcaaaaaaaatatatgttacccctcgaagaatttcaacgataattaatcatattaaagaaaaatggcatattaattctagagtggaattaggtattttagtttatcattatggttttatagatgcacccttattttcaaataaaaaaattcagctatgtaaaaaggttgtacaatagatagctgaatataacgagtttaaattgcaaataaaaatagaagagcagacaaacttttattatttggtttactccatcactttttaaatttcagacattaatataaaaaggttagagaattaacttctctaacctttttatatacactattaggtttcaaacagtaaagatgccctaatgctaccattgatcctgttccctattcaaccctgtataaacaaaaaaatcagatattaccactattcaaaaccagttacaattctctctttcattttctgtattacttcactgctcaatactttttgaccagcaggaagttttaatatggcagcggcacctttactaaggtatatttcttgatcattattttgatttactaccaatattccttgcccttcaaattcgaaataactaatatcttttgtttcatttgtattattttttattgctttatataatccatataaatctttacttctattttctccgcccgttcgaatcggttcagtatcattcgcaacaattagtccttctggctgctcacccttcataataaaccacagcttttcatttgttggtaatagtaaattcttaaattcagagctatttaaaatttgctgtgctggaattgtttcatagattggtaacgaaaatggagatgttgttattttttcaaaacttaaattttcagaagaacttcccttactatattgataatcttttaatgcgatcgattgtactgattcacttttattttttgatgcataactaattttactagcgaaaataataacggtcattaagcacatgcacagtatcacaagcttaagtagttttcccatttatgaacccccgcttttaatattattagtttgcatggatattataaacagtttcactccaccaaaaattattattgttatggaacgtactgaaattatgattataatgatcaccataccaagggtccatgtatgttatataatctgttccatttgtccctttataaaatccatcaagtactagaaagtgtccgatgttagctccattttgccacataatgagtgcaatcatcggctgattactattaatttgacttttgaaccaatcataagattttgctccagaacttatagctgagctaacaccatatcccgataatccatattgtatttcacgtgaagttgcaggattattatatgatccacccttaacatacctaacgtactgatcttgtgaaggagttttcccaaaataatttaaaactgaaaccgaagtgcctgcccaacaccaatttgatctttcttgtaatatgttaggtacagataatttacggtctgttggtgtacttgggggatttccattaatatacgctgacgttacatatactttttttccatctttaaaataataaaaccaacgattatctaaatttcctgtccagtaatctttaaccgcttcaccatactcccatcctttaaaagatacttttgtatttccgggaatcacatctacaatatttgcatttaaactttttgcctctctaacatttacattcaatggagctgttgttcctgaaaattcaacttcttctgctattattttctgaacaccaataaaactaaatgtgaaaaacaataaaaacatacaaacaataaaatgatttcttcccttcatttctccaccccttcatcagtactaaaaaacatcaacaattcatccttattaattgttcaagcttaatattacatactaacgaaaaatgacttctcataaagtgaaactttaatcagtagtggttttattcatcccccactgattattagttgaaccaatcgggctgcccggcaaatagtgggataaattccaatacaaaaaaggagcctataaatttttataggctcctttttatttcgtcgttattacttagctaattctttcgtacccttcattacatcaatgaagaatccccagttattcactacagaagagatactgatatgttcatctggagtgtggacgttgaaaatgtctggtccgaatgaaattgcatctaattcaggcatcttttgaacgaatgcgctacactcaatccccgcatgtacagcgaagatttcaatttctttattgtatttttcttgatgtactttttcaaataaattacgaatttgtgagtttggattgtatggccattctggatactctgactctatttcaaatgtagcaccaactaattcagcaatatatttgatttcttctgcaacatgttgttttaaactacttacagaacttcgcacttcgttacgtaatttaatttcatcttgcaacgtttcaataacgcctaaatttgttgaactttctacaagacctttaatatccatgctcatactttgaatgccatttggaattaagaataatgatgaaataagctgcttttgtgtctctttagcaaatactttttcaactttttcatccaattttgtcagtgtaacatgaacatctggatcaacagcacgcatttcttcttgtaatacacgtgtccatgattctagtttttcttctacttgtcctacatcttctgtacgaattaaaattgtagctacactttcacgcggaattgcattcgtttttaatccgccgtgaacttcacttatgtaaaactccgtatgtactgataaatcacgtaatactcgtcctaatactttgttcgcattaccgcgttgtttatcaatttccataccagaatggccgccttttagaccaccaacatatatacggtatgcatccatattcgctggcgtttcatcccaaattacttgaattgtttcaacagctttcgcaccacctgcactacttacaagtaatttatgatcttcttcagaatcaatatttataaatatctttccttcaaaatgatttggatcaatagcaaaagctccgcccattgtcgtttcttcttcagtagtgataacgacttcaagtgctggatgcggaatttcttttgaatctaataaagctaatgcatacgcaactgcaataccattatcagcacctaaagttgtttgatttgcatataacatgtccccaatgattcgtaattcaattggatctttttcaaaatcatgtactgttgcttgatttttttcgcaaaccatatccatatgaccttgaataataatagctggtacattttcataaccagctgttgcttcttttttaataatgacatttaatgcttcatcttgaatgacttctaagttacgctcttttgcaaagcccactaaataatcactaatttccttttcattacctgatcctctaggaatctttgaaatttctgcaaaatgaaaaaatacagggtgctttgttaattgttctaaagtagaatacatttttcaagctcctctcaaaatgaaaaaataatatgtaagtctcatatcattataccatgattcattattttatctttcttttaacttttattgttcattttatgtacaacactcttacaacattgtaagcgcgttgtaatctacatcgatttttctcatttaataatagtcgtatactttctaaagaaacacattaaaggagataaagaaaatgaaaaagtttttagcaattattacactatgtttattattttttagttttactattggctgtgagagagcgtcactaaatagaattggtaaagatgtatattacatgcagataaaaggcgaaggaactatcgaaaaagtagatcatagaaacttacgaaactatacgctgtccgcatatgatgaagatggcgtcaaaaaacaaattacatttagaagtacaaaaaaagaaaacaatcataaattaaatgaagacgcgtttttacgcctttatgtagatcaagatgataatagcaacaatgaaatatcatcaattgaagtaaagtcctatgaagagattcagaaaacagatttacctaaaaaagtaaaagataagtttactattaaataaaaaacaaaagaaaatgctctatgcattttcttttgttcttttcacctgtatatattttgaactactattattcatcagtttctctaaccgatttatattctccgttaatgcacctttcacaagagagaaatctgtattggattcttcttttttttctttaaaaaacgaagacttttgtacattgacttcagccatctcttctcccccttttcaaaaagatacaaccttttatttatattatatagcaaatgtagaaagagtgtacacttatgattttctttttaattcttcttctaattcttctacttgctgcaacgtatccccttttattaaagagaaatctgttgtatcttcgttatcttctttaaaaaaatcattgtcataatcttttaccactacaatcacctctacatgctagtgtaggaatgattgtccaattttattcaactttgtcggattttgtttttaatttatgtatagaagaaaaggacagaaaaagattctgtccttatttactaaaataactatgatgtattgttaaattatatacattttcaaaatcccgatcttgcaggttatttttctttccatcaataacaatgaaaacgtcacttactatttttgctggtataatcccgacattttctacttgcaccgctttctgctcattcaattgctcgatatgttctaacgggacgataatactaaattgtgagcgaataccacgaaagtttgtatttaattccttcgcagcttcaaaaacaacaattttcgcgccaatcttttccccatatgaatctaaaaatgcatttaagctctttgtatattcctcttccgtatgccattccatcgtaccgaatactgctggattaacattttgaataattgtcgtgtatatttctcctcttgctttagatgcaattaatgatcgttttatggattgaactgtcttgccaatatcgctaaatttcgcaccccatatttctgaaatattaggcgttaaaatgaacgcaatatcaacaaaaataaccattgcagtaaacattaaaagatttttccagagggttaaatcgattccttttatcatgaaatacacggtgacagatatgataaacaaaccataccaagtctttctaatacgttgcttcttctcctcgtacaactcttcatttttccaataaaagaaaacaaggactacaaagacaatcgctaaaacaaataagccaattcgaatgttagagatcattaatcacatcaccctccattcaaaaactactcacgatatcattacatgcgcaagctgctctctttatgacaaaagacgtggacaagcttctaaaattagctacatcgcatatatattagaaggtaccacgtcttttatcctgctatttgtgggcagtaagaccccactgattaaaatttcactttaccatgagtctatattgtatatgtagacaagcattcatttcaaattttcgtattaaaaagaaatatgtttcggaatttccccttcaggtacttctccatccatacttaaataataatgacgaatcggacgtaagttttcgtctaattcataaacaagcggaatgctagttggaatatttaatgaaactacaccatcacttgaaaggttgtctaaatattttactagcgagcgaattgtgttaccgtgtgatgaaataattactttattaccactttttaatgtcggcgcaatttctgaatgccaataagcaagtactctcttctccgtatcctctaaacattcagttaatggaaattcaccttttttgagtgttttatatcttggatcggtcgcttcatatcgaggatcgtcttcagtaagagccggtggtcttacatcaacacttcttctccaaatatgaacttgctcctcaccatacttttgagcagtttcatctttattcagcccttgcaatgcaccataatgtctttcatttagcttccaagatttatgtattggaacccaagtaagatccatctcatgaagtacaatccataacgtccgaattgcgcgttttaatacagatgtataagccacatcaaaagtatatccgtttttctttaatattgctcctgcttctctcgcttcacttaatccattctctgatagatcaacatctgtccatccagtaaagcgattttcaagattccataagctttgtccgtgacgaataagtacaagttttatcattataattcccctttcggaaatgtgaattttattgttccattgcgtacacgtataaagtatctagtaatgtatctttttatccattcactctatgaccaatcgatagttgccaaatgtatggataaaatttgttctttttcaaacgataaaaacagaagttttttcattatttttgatcgactggtatttcacgtttcgatatccaagcatcaaaacctgatcggctatttgccatttcattcataacttggtgccaattgtcctcacatgattcaccaaattttgaaaaaatagcacccatttgttgtctttgtacatcactcagttttttctctaaatctgtacctttttctgttaaagacaactgtttcacacgtcgatcatgcatagcttcattactctcaattaagcccttttccacaagttgacgtagcggtccgtggagcgcttgcttacttatttctaatagtgataataactcatttacacttatccctggaaaacgtgcgataaaaaataaaattcgatgatgtactcgttgaatgccatattcttttataatttcatctggcttttcagtaaatgttttatatgcaaaataaaataatgctaatgcctcattcatctgttcttctttatgttgtgtcatctactttccccctgtatgtaaattataccacaatctagtaatgaatattttaatcaacgcattagaacttgttcagtctattgaaacattcattgcataattaggagatgattcatttgaaaaaacaatatactgtaagtacatatttattggatagactacacgaattaggaattgaacatatatttggggttcctggtgattataatcttgcctttttagatgatgtggtagcacataaaaatttaaagtggattggcaattgtaatgaattaaatgctgcatatgcagcagatgggtacgctcgcataaaaggaatcgccgctcttattactactttcggtgttggagaattaagcgctattaacggtattgctggctcatatgcggaaaacgtgccagttataaaaattacaggtacgccaccaacaaaagtaatggaaaatggagcaatcgtccatcatacgttaggagatggaaagttcgatcacttttccaatatgtatcgagaaatcactatagcacaaacaaatgtaacacctgagcatgctgctgaggaaattgaccgtgttttacgtgcatgttggaatgaaaaacgccctgttcatattaatttgccgattgatgtgtataataaaccaattaataaacctacagaaccaattttatataaaccgattttaagtaataaagaaacgctggataaaatgcttctacatgccacttcaataataaataacgccaaaaaacctgtaattttagctgattttgaagtagatcgatttcatgctaaagaaagtttacatcaattcgtagaaaaaactgggtttcccatcgcgacgttcagtatgggaaaaggaatattcccagaaaaacaccctcaatttataggtgtttatactggtgatgtaagttctccgtacttgcgaaaaagaattgatgaatctgattgtattattagtattggcgtgaagttaactgatactattacaggcggcttcacacaaggttttacaaaagaacaagttatagaaatccatccctacactgtgaaaattatagataaaaaatacggtccagttgtaatgcaggatgttttacaacatttaagtgattcaattgagcatcgtaataaagatacccttgacgttaagccatttattttagaaacatcaccttttactgaagagttcaatccaaaagcacaaatggtcacacaaaaacgtttttggcagcaaatgtaccatttcttacaagaaaacgacgtcttaattgtagagcaaggaacacctttctttggtagtgctgctatccctctacctaataacactgcatatgtaggacaaccattatggggatctatcggatatacactgcccgctctacttggtacacagctcgccaatttatcacggcgcaacattttaattattggtgatggttctttccaagtaactgcccaagagttatcaactatactacgtcaaaatttaaaaccgattatatttttaatcaataacaacggatacactgttgaacgtgccattcacggacaaaaccaactttataatgacatacagatgtgggattacaataaactatcaatgatatttggatcagaagaaaaaagtctaacatttaaagtagaaaatgaagcagaattagcagaaaccttagtaaatataatttttaataagaatcaacttatctttattgaagttataatgagccaaagcgatcaacctgaattgttagctaaactcgggaaaagattcggtcagcaaaattcttaatataaaagcataacctaattatacaactagtagtgtaaaacttgttttgagaatagtttcgacactcaaaatacataaggaaaaggatggaaagtaccatccttttctattttaagagccttcttcgactaacgccccgtgcgacaagcaaaaattcttaatccatctttaattttatagcttttgtcgcaataaatgttttaatatgcttatctaatatccttgttccaccaaaatcatcctcataaaaacctgttatagcaaaaccagcatcaatttggccttggatttggtcttctaaagtatgcgcatattctattgtttgatttgaatcgatgtaatcttgaacttcatcctctggtaaataatccaatgttgatgaaggaattgaatgtttaacatccagaatacctttttgctcttggttatcatcaaaaatccatagtaacggatttgtaaatccagcaataagaacacctttattctttaaaaccctagaaacttcattccatacaagatgaacatctttgacaaacaaattagacacaggatttacaacaatatcaaaatattcttcctcaaaatcactaaggtctgacatatctccttgtacggtttttaaagttaaaccatcccgttttgctaccttttcatcttgttccaattgcttcttagatatatcagtaactgttacatctgctccagcagcagatagaactggtgcttgttgtccgccacctgatgctaagcaaagtatctttaatccatctaatgactttggaaaccattctctaggaactgatttttccgtagtgactgtaatctcccattcacctgatttgcttttctcaataatctcgctacttacagactgcgtgtatctagaaccttcttccaccttcttatcccatgcattactgttttgttgtgtagtatccattacaattattcctcctaacaatctagttgcattttaagtgtaaacttattaactatttatgctttcctttttctattaacccgcctgatagttcatacatagttgtctatatttatattaacagataaatgctaataatcgctaaaaattctaaaaagacaaaaaattatacatctattccattcatttaaaataatcgtagaattggtaagttttaaacaactcacttccacataaaaatagcattccaaatctgttgacagttggaacgcttttttatgttatttcatttttcaagcttttaactaaatccattaaacaaataagctacgctttttctttttttattcagcaagagttaactgccaagatacaccatacttatcatttaaccagccaaactttttactaaacggataagaacctaaaggcataagaatcgctccatcctgcgctagtttatgaaagaccgtttcaatttcttcttctgtctcacaagttacataaagagacatagctggagtgaatgtaaaattatgatttacataactatcaatacacataaactcttggccatttagcgtaaaagttgcatgaattacagttccctctttaccaggtccattttcatcgtagcgagaaatacttacaatttctgattgatcaaatagtgacgtataaaaattcattgcttcctcagctttgccctcaaacattaaaaatgtagtaattttttgatttgcgttactcatatggagacagccccttgttatgtatttatgtaaaacatacgccaacaaaaccaaacgtacgttccttttaatatattgtctataaaaacgatgagtttgtcaattatctactttattatttcttcttaaataatgctgtccaaagaaatgattctccaaacatttctttcggttgtttcatttgtttcattcttctaatcacaattacctcaaattctttaaatatctctcttaacttttcttccgagtatgcaagaccaccttgtagactccaccctctatatacgtcccaatctgttatttccgatccatttcgctcatctaaatcacctgccgcaaaacatgttaatccgaaataaccacccgattttaatgagtttttaattaaatccacataatttattcttctatgcggtggaatgtgatgcaaacagcccgaatcgtatacaaaatcaaattcgttttgaacctctaaattaaaaattgaatcacaaataaaatgaattgctacctcttttgccaatgccctttctttagcccaattaatgccttctacagataaatccactgctgttacatcaaatccttgagtcgctaaataaatggcatttctacctggaccacatccaagttctaatactttcccttttgaaactctctctttttgtatatacgaaactaggttctcatctggaacattttcaaaaaatggaacatccttttctctattctcataaaattcattccaaaatggttctgcaggtcttaataatgaatcaagcatttttaaaatgtcttcttgtgtgtgtaacgtttcatttttcattaatacccctccacaaattaatagtcagaaaattattatatatctttttgaactttcaaacaaagaaaaaactcctacattcaataggagtttttccctttaaaatccaagtatagctaaccattttaacaacttctcttctcatactttcaaatgatcatgttcctatttacccatccgtatttcactaacaatttctccgtctgccaaaaaaagaactctttctgttttcaccgctacctttacaacatgagtcacttaagaagaatactttgctgaaaaataaagccgatttcgttaaggcatatttttgctaacgcctcttctttcatacatgatatttcatacaatcatacttttctaataaaataacgtttttgttcacttttttgatacatttacgaaacattcatgtgttatcttcattaagttcttttctttttataatgtcgtgtgagatataccaacagaggaagccctagatcccctaatcctagggcttttttataagaattttatacattttattatttccactaactctttaaattgtatatacataatataaaattttcatgttgttatattttttgatggcctcttatctttccttaaaaggcttttgtttcaaataacgcttttgtttaatttatatttaaaaagttccttttcataaagacttcccttatatgctatactcattcttaaataattgtataaggaatgttaaaaatggatgatagatcgtcaagacaatggaaattgcgacaaaagttaagagcactgaaaaccaaaaacaacaatgacacaaaccctttgtttagtgaatgccttgaatccctaggaaacgaaactctcattttctcccaagaaaaaagccagcagattgctactattttaatgaattcatttcctataactgtctcgggaagaatagattgggaacagatagataatcaattcatagcttcgaacaaagaacaactaatttcccttattagagcaaaccaactagattttgacgaacagatttttataatatgggataactatgaaatccctgtagtaagtacaaatcttgataaagtattccaatcactagttgacgttgatgcagtcagtttttattactggctattagacaaagaatatagattcgtaattgaaataaatgatgaagaattgattaggattgggtttcgctaatactctaagcatatgaagctagttcccttcatttcttaatattttcttcgtcaccaccgctattattatcattatgaaactaatagcaaatataggtaaataaattttcgtactgaatccttcaaacataaaaccatatacgacttgcccaattggtgccatacattgagataccgctgttataaatgccatcacttttcctagattttcatttggtgttttcttttggactacagtaatcacataaatggatacaattgtcataatcattgcgattagaagagaagaaagtataaagaggataaatggtggatagtatcctaaattaagaataaacggtgtaactgatagtgccactggcattactaataaagctatgataagcatccaattatataatgttttcatctgtaactttttagcaaagaaaccgattgacaatgcccctaatatggttgcaaaatcaattaatcccattccaattccatacatcgtatcgctactctgcatagttactcgtaacataataggtcctccaacaacaaataacggtgtcaaaattaagtttagtaaagttgcaagtaacatagccttcaaaataaaaggttgctttaaaacataaagaaaaccttttttcatatcttttacaattgtcggtatgatatggctttcttgcgctctttttataaaaggtattgtaataaacatttctaaaattgcagataaaaagaaagcaagacaacttgttattacgagcattttcaaaccaattatgccatataatattcctcctagtacaggtgcaactatattagataatgcttgcacaccatttatgataccgtttgcttgttctaactttttctctggaactaattgcggaatacttgccataacaactggtgagtacattgcactaatgactgctagtaaaaacataattgctccaatcaataaaatagataccgattcagttaataacaaaactataaaacttaatacaatagcagcgtttataaaatccaaaatgaccattacattacggcggttgaaacgatctgctatcgctccgccaagaggagctaacaaaaacgggatactcgttatggcatataaccctgcaaatatatcggcacgtcctgttatatctagcacatataaagacagtgcaaaacgtaatagtgttgaacctaaaatagtaataatttgaccacttaccattaagtgaaaatctttcaaggaagattgaatacttgctggcatcttcatcacatccttcatttagtctagaccgactgccggtctataacacccaaacagaaaaaagctatttctgtttcattaaaacctcgatcatataatcaaaggacccttctttcgctccaacagatacttccatcattttaatataagccttagctcttctcatcatttcttccggtttccactggaataaaccatcatcaaatatgacttgtgctgaagagagtaataattcaattgtttcttgtgggtatggagtagaaaatatgccttcttctattccttgctctaaaacttccgttaatacaggagataaatgtataatggattgcactaaacttttctgatgcatttctgcattatttggttgatggaattgttcaatcattttttctttgacatctcctgattttggtgattgttccattaaaattttaaataacttatctaaaacggggatatcgggattggagacaatccttttcgccttagtgacatcctctttaataatcctcataatgatttcatccattacttcctccttcgacttaaaataatgataaaacgtcccctttgctataccaatttcttttaaaatatcattcacggttgttttcgtataacctttcgtaagaaacaaacgctcagctgtttctaaaatttcctttctacgctcctcatactcctttacaattcgcattcaagttctccttcccatcagaccgactgtcggtctattaaaattatatgtttagtttgcaaaaagtttcctattatcgtacatatacaacaccatactttctatttcctttataaatttttattttttaacgtccgctcaatttgtttaaaacgtatctcatgtttcttatcgtcacctttcattttaggaaaagaacgatgcctccgttcgatctatgtacttatcaatggagtattttgttgagttccaatatgtaatattgcatatttcgtacttttaatttttgtatatgtaataatttatttataaaaatataaattattaataagggtgatttatatgagcaagttccgaaagaagattattaaatatttgcaaacattttggggatgcttagcatttggagtattaatgtttgctatcttcttaattacggatttaacagatgcatctttaaatacattaggctggagagactggctaggttctgtagcaggcgcaaccattttatctgttgggatgtttactttaaataaattgaatttaaaataaatattcggtcaatactgaatttgggctgtatgccaacattcatttaaagtagtcttctctgtatctccttgtattgagcagttagcttttgctagccgctcttttattttgttccggttcttgcctcttaaagaactctttatctactttcccccaataagtacacatatctattctccattgctacaaaatgaaatctttattttgttttacgcgtcgcttcttcaatcagccaagatacaatattaaaatcattagtttcaccctttaaagatgttccgttccaaaagcattctttcatcacttcaagtaatttttcaacagcttcaattcatctcatattaattttccctttctcccaaataactattttgttttattaattaactgattaataaaacaaacacctttattaaacattccatgtttcttcaccccttgaatatttttcaaataaaaatacatactattttcaagccgccgtgtccatggctaatacctctttcttttgatgtatatttttttagaaatcgaaaataataccaacaagctgtttgaactagcagcttcactcttctcgcaatggggatgcaaattatcacaattagctaactcattgaactcactggcagacaaccaaaatcgttgtctgctttttgtatgagatttttcgttttacatatactacttttgaacctgcagaccaatacgagccattttggtgcttgggatttcccttccggggataagtatcttttacttatcccttttttgtatagacacgtatatttagggtaaaactaattacaagcagattttctgtttatgcgtagttctaaacaagattactttttctcctattaaaggacggcaggtacgactgctagtccttttttcttatttcgcatattatcactaaattaccttcatcgtcgtcgtaagcaatttccccataaggatggcagtggtgcttctcgagttcctcatcgatcaaaactaacaaattagttttccagtttccaacgatcgtacaccaatacgagtttaatccttcataaacttctcttgttctatttcaataattgcggaatgtataatgaaaatactcgctcgcttcaataccttttcttttaaccaaagtgttctgctgaatgatagtaatacccttgcactaatggttttggactataaaattccctttataaatttcaaatgcggtgaatgaaattttgtttttttcttgccatcatccttgttgtatacaaacaaaaaaagagccacaatattttgcgactcttttacaattataaccatttaacggccacgtctttgctgaccttgctttgtactaccttttttattacttggcttattaaatgatcggttattttcatttctagaactatttctcgaactatttcttgaatcacttcttgagctatttcttgaatcacgtcttgattcacttcttgaaccttcgcggctatctctttgacgattttgacctgatttcttcggagccagctttggtaccggttttccattttcatctacacgttttatcttcggttgttcgattatttctctttgtattggtgcaccaagcgttttttcaatttcttctaaatgtttttcatctttcgctgcaacgaacgtaattgcaagacctgatccacctgcacgtcctgttcggccaatacggtgaatataactttctacatcttcagggatgtcaaagttaaatacgtgcgttacaccatctacatcaagtccacgagctgctacatccgttgcgattaagtactgaattttagcttcgcggaaactcttcataactctttcacgtttcgcttgaggtatatcaccatgaagttcagcacaattataacctagtccttttaaattatcatacagtttacttactctaagttttgtacggcagaaaataacagctaaaaatggctgatcacgatccataacaaaacgaagtgcatctggctttgcacggtctgtcgtctcaatgacacgctgctcaattgtatcaaccgttacttcttcactttgtacttgaatcatttgcggttcatccatataacgcttcgccaattttttaatatcttttggcatcgttgctgagaataacatcgtttgtttactacctggtgtctcatctaaaatatcttcaatatcatataagaaaccaaaataaagcatttgatccgcttcatctagtacaatcgttgaaagattacttaaatcaattgtttcacggcgtatatgatctaataatcgtcctggtgttgcaacaacaatatgtgtattaccttttaattttctcaattgttgtgctacatcttgcccaccataaatcgctagtacattaatatcttctctttgaacaagcatttttttaatttcagttgtaatttgcagggctagttcccttgttggtgcaacaattaaagcctgaacatcactagactctgaatcgattttttctaaaatcggtaacacgaatgctaacgttttacccgtacctgtttttgcctgcccaataatatctttaccagacataataacaggaattgcctgctcttgaattggtgttgcttctgtaattccattttcacgtaatgtatgattaaaagtttcactaattcctaattctaaaaaatttttcaaatagaccacttcttttccttatttttcacattagctttcattgtaccatttgtttcgccaaatatgaaaaataaaaaaattcttatcttctttttttatattcatcctgtactagatgaacaaattctttttgctttttctcagattttattaatgcttccatatttatagaagtcaaaatataccttttaatttttctattactccaaattaaacttgtatacttcagatcttcatgtagatttcgaaaccactctaattcacttaattttgcgatatgatgtttcaatttcatgtcatttcgaggataaaataaaatgatatctgctattacatcaaataacgaacccatcttctcccccctatactcttgctcaaattatatatattcttctttacatatatatttcaattttaccgaaatataatgttactgatttggttgaaatcgcaaaatatatgaactaaaaaccaatcttttcgatttaggaaagaccgattttcattaatttatacagtaagctttcctccatgatagcaataatactgtgttgctttaaaacttttaatcctatttaaagactgtttcgctttttctatatctaaacaaaaattcggattagctattactaacccacgattctcttgaacagccgcatctcccgtaattacacaatctaaattcggaaaatataatgaaatatgccccgaagtatgtcctggcgtcgctactatttgacattcattattcaaaatcatttgaccatcatgcactttttcatcgacggaaatatgttttatattttttaactgttgtataaaccatttaccaaattctttttcttcatttggcatacgttctaacatttcttcagcttgaactaacctctctgattttatatcaccactaatatagttagattcaatttcactagcaataacattaatttgaggatatttcactttaaaatcgtataaaggccctatatgatcatcatcataatgagtaataattatattctttaagttttttatctcatatccatgttttaatattgcattttcaattaaaggtaaaaaacttggatatcctgtatcgactaacgttaattcattatgtaatataattaaacttggataaatacattgtttttgcccgttaaattcgaattcaattggtagttctattattttcatttttcttcccccataccgcctattcaatatttaataataaccacttcgtccacatacattttactatacatattaaaaaattttttatcagtattttgttttaagttttttattagttaattctatttttaaatgtggataccaaagttattttatatctatttctcatatgtgttagcaagttcgtctgtaaaatcatagacagggttttcactcttaacctaagctgttactttttataaatgaattttacccttattggacaagtatccgtttcgtaattttcatatgtaataaaagagacatctccttaaattagaaatgtctcttttaaattaatagaacaaattcagttgtatttcttttttgtgaaaagttttttcatcaataaattatacattttcagtgcttgtactacaacttgtcgagtataaaattggtataccacatatagcatcattcattacatcacgaaaaacttttgcagcgacttctgtgaaagtttggcatagattagaaatatcatcattaaaaaactgaatcacttttgcagcaaaaaccggaaaaacaacattcgctccacctgggaactgcggctgcacaacaacttgctcaaaatacaagttgctttctaaagctacttgaaaaaggtgtgcaatttcaaaagcatctaaaggacaaggaattgggtttacaattccatccccaataacactaacaacaatagttacatttacattgccaaattgcactgtaggtttaagaagtgtagctaatgcaatcgctttttcaaaatccgtagtttgtactaaaataataaaatttccatcagtcggtattagcggacctactgttacagttggatcagcccctaccgaatttctgagttcgttaaaatatgtgatccatggcggtgaaagttgaggttgtacacgctcgtccattctttttccacctccttatacaattctcaatactataatatgaaaaaattctaatagcgcattagatatatttattatttttcatagcattttcgtatcaatctgagaattttgtttgtttagaaaaccttttagaaacatttaaccatttattgtatgtcaataatatagtagtgaaaaatttacaggtgaaggatatagaaagaacaaggttgctagttcattaattgtaaaaatatgacgttttagatgaataagctttatttgcagtaatatacctttattattatgtaccttatattgcagcgattcactaataagacgtacaatccctatccttttagaagtaattaaaaccttcggtgaaatcttctttagatagataccatttgcaaattgtttaatttaacaaatactacttgcatactatgtaatgaaacactgtgaatcattgtataatccacattatattattttgaacaggtaatcccctatttttatggaaatatataattaagaaaaacaataaaattgattaatctctcacttctttgtccatccttttaaaaaatctatgtttttgtaaaaggagtgtttatatggagaaacagacactttggaaaaagttcaaaaaaagctctgtaaacctcggtaaatctagcgtatatgaaagtattattttattctacacaatgaaaaagaaagaattacctactaaggcgaaattcataatattagccgctttatcttattacgtattaacaatcgatttcattccagatatagctgctattattgggattggcttattagatgatgttttagcaatcgctgtagcgcataaatacgttatgagacacgcagatgctgaaattcgagaaaagagcaaagtaaagatggagtcattatttacttcagcacaagcataatgaaattatctagtcatttacctacctttttactttcaaataaagctaactgtaattaatgatagttccacctcactgaatattacccttcaccatgagagcatagcagaataaatccctaaacaaaagcatttctcttagctctcaaaccgtaaacaaatcgggaatcagcacttgttcctaagttctgactcccttttatttgttcttatatctatctgttatacagttgcatgcattcccttatacaaaactgccattgccgctactataagaatcatacccataaaagcaggtacggcatgaccaagtgatacatagatttgtcctccaataatcggaccaatcattcttgctaaagcttgaatagattggcttccaccttgaatccttccttgttcattagaactgacagactttgaaagcatcccgttgaatgaaggcccgaaaattgaatccccaaaaccaaacattagcattccaacgataagtagtggagagagtgaaaatacagctgatgctgcaataaaactgtatcctataatctccaaaaccatcccaagaattgctatttgtttatcactaagcttaattaaaagctttggcattataaaactttgtgaaacaatgtcttgaaagcccaaaattgaaaacataagtccgattaatgcaggtttccaactgaaagtatccattgtaaattgcgtgaaaattgcttgtaaagatccgttaggtatccaaagtaaaaacgctgagataagtaaccattttaaattttttatggaaagtatatttgctagctgtgcaaaaggatttaaccttacaaaagtaatctcttttaacctgttatttttgtcaaggctctcaggcatgtatttcataccatataaaacatttaataaagttatgaacgctccaaagtataaaggtacagaatgaccaaactttgcaagtaagcccccaagagttggtccaataatagttcccgcacctacaactgcactcacccatccaaagtatttcgttctctgctctttcggaatgatatctgcaaaatatgcgaagatagtacttatgctcccacctgttataccttctattatccgtccagcaaataatacccataaagctcctcctatgccaaaaactaagtacccaattgcagaaccaaataagcatattaaaagtaatggacgacggccatacttatcgcttaaagccccgagtgctggagcagctaaaaacacgcaggccgcatatacggaagttagtagtgtaacaaccaatgcttgttcttccggattgcttgtatatggctgtactaagaatgggactacaggcataatgatactgaaacctataccacaaagaaatacagaaataagtccgaatagtaaagcatgtttatctatgcttttttcagtttccctttcattttgtgatctaaatatagacatttaacttctctccttaaaatgttttgttgctttgtcaacaaaatgataactctgttttgttgattagtcaacaaagataaaataataaaaaagcagcctattctcatattagagtaaggctgccattttattattaaaatgtattacgatttaatatgtataccttgtttctttatttctgcatccaaatgtctactatacttttccacaaagctaattatactgtcgaattcttcttcagttacttgctcaaatacagctttatcccgctcttgaaactctttgtgcagatcttcatggattttataaatttctttcccttgttcggtaagcttaaaataaatttctttcttattttctgacttttggtaactttcaacaaggcctttttgtatgagcttcttagtcattctacttatagcaccgcgagtcacataaaaagcctctgcgagttgcgtcacgttagaatctgcattgttttcaatatattcaatacagtggacttcagaagacttaaaacctttaagaccttcttccatcttatctttattaagccaaaccagtttattatataattccctgaaaccgttcatgacctgttcttctttattcatgatctgccctcctcaccgctcattagcacattaaaactattatattaaatttctgcttacatttcgacaatattgaaataattattgtaacattaaagatatgtgtaaaaataggcgcttaaataaaataatttttaaacagcaaattttgcaagtttattgctacttacagtaaacagtagacaaaaagtaagagctaagactatttctcttagctcttctttcataaaactatttcacttcattagcgacaaaaaagtgctcacatacacttgatatgcgctgtaagtctacgttcccaccagatataaccgctactactttttttccttttatatagctatcaacttttcctgcaagaagtgcagcagttgctaatgcacctgcaccttctacaacagctttcccacgttgtaataaatctttcatcgctacttccagctctttttctgatacagttacaatatcatctactaattcttttacaatttcaaatgttaattcacctggtattttaactgcgcaaccatctgcaatagtaggcgcctcataatgttctacgattgctcctttatcgtaagatgccttcattccatgaacattatctgcttggacaccaattatattaatggatggattaaaagatttcaatgctacagcaatgccagaaataattccgcctccaccaattggtacaatgacagtatctacatcccacatatcatcaagaatgtctaatcctattgtaccttgaccagccattacctctacatcatcatatggatgtaagtatgtttcacctgtttcccttataatttcttcacattttacctttgcatcatcaaaggtttcaccatgtaaaatcacttcagatccatatccttttgttgcttcaactttcgcctgcggtgcagaaattggcataacaattttactcttaataccgagtaaatgagcagataatgcaactccttgtgcatgattacctgctgaacatgcaattacacctctttctttttcttgatccgtgagccgcgacattttattaaatgcgccacggaatttaaaagaacccgttaattgcatattttctaatttcaaatgaatttctccgcccgttttactagtcaaataaaaagattttactaatggcgttttacgagcatttctatctagaattttgtgagcttttttaatatcgtctatatgtaatggtagttttctagttatcatactgacacctcttccaaagttctatttctaagttttcgtaagtcgtagctcctttatacgaaaagagaaaatctttatatatgtaccccactctgaaataaacatatttgcaaacaatttaacatcctcttcatatcgcgttctttataatgatttaaacatgcaatttgaatccaattattcttttgtaaataagatgactcataatgaacaacgtatccttgtaatgctaatgcatcgcctactactttagaagaatgctcttcgctcaatacaatagtaagtataattggtgcggcgtgttctttagttgaaacaagctttaaacccatatcagtaataacttcttcaacataatcgtatgtctctttaatttttacaaatgccttttcatcttcaaatctcttcaacgcttcttgcaatgcataaattaaattccatgattgtgagtatggaatgctttcattttcttcatacatgccaatgtccatataggccggcacagcctcgtttatttttacaatgtggttatgaaaaacgaaagaaattcctgtatatgatttaatcgctttaccgctaacaccacttgcaaaatacacatccttcaagtctaatggtattgctccaattgaacttatacaatctacacatagtttcatttgattctcgttacaaagagtatttagctcgtctaaatcgtttaacattccagtagatgtttcatgatgaacaaaccaaagccattcataatttccagttattattatttcttctaattcgttataaataaacggctctcccatttcttttttatacgtatcaaaatgtaattgtgctcgttttgcatgtccaactaatctatttccaaattctccatttgttaatattagtcctttcccttttaaagaacgtaactgtaaagcaatcgcatcatttgctaacgtccctgttcctaacataagctgtacatgttttgcttttgtcatgtgaagtaaccgttttttcacattgtccattgtcacttgaaatgacttagagcgatgcgaaataggccgcgtagaaaatgcctttcgaacattctcttcaatatctactggaccaggtaaaaacgtatattctttcgtcataatccctccaacactcgactcttcaaacatagcaggagtaacatacattggctggaaggctgcttcttctgtaccaactaacgtatgaaaagatttgaatcccatttgctcatataaaggtagttcacgtgttgttgcagaaatgagtgctaattcatatccatttagaagcaaataacgatgtagaaaacgaattaatcctaacaacgctcttccatttctatattcacgttctactgaaagtaaacgaatttcatacactttttctccatgctcttgcaaataaatatctaaatttgagattttataatctaacgagaatggtcgttttccccgcactgcgaccatacctactaatctatcctcatctaaacaaattaaatatgtattttcatcatgaaagcgatctatacgaacacgctctttcgtttcttcatgttgcggaatttcttctacaaatgttttataattcaatttatgtatacgttcaaattcccgatcttgatcagcaactttataaattaaccccatggcttatctcctttatgtatttaataaaaattataagtggagatttactccacttattaaaatttcgtttcagtctcgatttacatataaaataagcacaatgataaaagcacttaaaatagtcgtaataatagaataagaatacaaaatcatgcaaactggtaaacaagcaattgtaattaaccctggcttagtaaaccctttaaaaattaaataaaatataatgaaaacagcaacaagagtaagcgctatcaaataatcaaatgcgattaatcctccaataaatgttgatatgccttttccgcccttgcctttaaatacaattggataaatatgtcccagtaaaacagctagtaaagctaacattacaaatgtagaatgtccaaaaaggtattttgcaatagaaactacgattgcccctttaattgcatcacctaaaaatgtagcgatgaaatatccttttccatatacacgccccatatttcttgcgccgggattcccacttccttcatctcggatatcaacgttatatctccatttcgttactatataagcggtcaatatgttcccaaataaataagaagcgaccaaatacaaaaactgcatactattaatcatataatcattcactttctacatggaagtacttatacaatattcatgaactatgtatattgtacttttttatccacttccctttatacattttaacatcatatatttacaaatcatacaaaaattctcatacgctatttttaaaaatatatatccctcattaaataatatgttcctttcactgccatttctgcttgtgatacgaatgtaatttctttcatactttcttcacagcatttcttaaatacagcaaatatttcaggaactaaacgcaatatactgccacttactgcaattggcgttgagtgcttaaagttcaacttgttataaacatttactgtaatccttgccaattcttttccagcttgcaagataatttcacgtgcatcatcattcccatttctcgcttcctgaataactaatggcgcgattgctgcaactttatcttttgaagaactataaactagtctttttatatgagacgacgtcaaaagttgaaactcatcttgaatccttaagcttaatggacaaagtgcaactccttgatcaaattgattggccattctttttaaaccttgtaatgcaatccaatatccgcttccttcatctcctaaaatatgtccccatccaccactatactcgtacacttctcctttctttccaagacaaattgcacctgtgccgccaattgttaaaattccatcttttccttttaaaacagctgcatgtgcaatcatcgcatcattaaaaacttcaattggtgttccatacttcttctttagacgtaatgttaattcattcgtatttactccacttacacccgctaatcctaaacaaatacaaacgcaatgcccatttaatacacctttctggcattgatcaatcacctccataatatgcacaagaacttcttcaaaatctattaatatatttccaaaaccacttgtagctcttacaagttcatttccgtctttatcaaatgcaattgcttctgtctttgttcccccgccgtctactccaatcatatatttcatctattcgcctcattcatttcaaattggagggaatgttatattcccaaaaactacagattcctttgcacctgttgcgctcggcacattactcggattacgatgatatgtttcatttgctaaaatggcaaaggcgattgcttccttcgcttctgaagaatagcctatatcttcttgaaggaataatgcacatttttcttctttcaatccatgccgtatcatttctacaagtgtatcattataacttccgccaccacctagaattacctcatcgatttcataatacggcagaataaactccttataatgataaacaattgaacttgctgtaaaccttgtgacagtcgtcaatatattttctttactatgcttttcaaaccgctttaataactcactgacaaattcttctccaaactgttctctaccagttgatttcggtggattcattttcagaaatggatgattcatacaatatgtcaaaacctcttctacaattacccctgcaacatacataacatgcatgacctcctatttactaaaaaacaatcatgtaagtaaccaacgtacaaccaatcgaaaacaatataaatctaaaaaacaactgagctttcgatgcaaacgatccatcaatgaaagaaacaactaccgtaagcaaaacgcttgccgcaatacttgtaacgagccaaatactatgcatttgtgataaatttagcatgcctaataaagggacaaaaagtaaatttgcacaaatcactccaaatagtaataaaaacacacctttataactaaattttatattcattctatttccccctttctagttttaatgtgaaagaagtgatagacaaaaagtctatcactcaaaataacagcatgcagattaaggattaaccgactctccgtcaccattcttttcgatttcaagcatatttttgtcgtacattttaaagaatggtaaataaataagaaacgatattgctatatttataaaaactaatacaatcgcacgccaatctccacctgttgctaaatatgcaccaattggagcaggtaatgtccatggcggcataatatgcgttggtgttacaaatcccattgcggttgcagcatacgctatagtagctgttactaacggggtaatgacgaaaggaataattaaaattggatttaatacaatcggcaaaccgaatataaccggttcatttatattaaaaatccccggaacaatacacgttctcgataatgctttcgaatattttgatcgaccaaatacaatcatagctaacacaagccctaacgttgcgcccgaaccaccaatccaaataaaccattgataaaacggttctggtgcaataaacggaaaatgactcgctccacttgctacagcttcaccgttctttcctaaatacacatcccaaagtggccttgccacagtacctacaactgatactccgtgtatcccgaaagaccagaaaaacgtaattaaaaatacaggtataataacgccaaagtaactatcaccagcttttactaacggtgcggctagtttatctacaacgtaatgtaaatcaactttaaaaacgactgtaataagactcatcataataataacgaatgctgcaggtataagtgcttcaaatgaacgtgatactgacggtggtacttgttctggcatttttatcgttacgttattcttcttacaaaaccttaaaatctcaactgataaaatagagacgatcatcgtcacaaataatccatgacctccaagatttgtcatcggaagcatgaatccttttttatcaattaactcaggcgttaatgttaaaagtagtgaacataccgcaagctgtgctcctgataaagcatctaatttataacttttcgctaaattatatcctattccaaatgctatatataaggacataataaacatagttaaacgatatggtatcaatatacttgtttgattctttaatgcccaaaccgatatgaaactatctttcggcagtggtggaaatgctactattaaaaaaaagcttcctactataataaatggtaacgccgaaataactccatcacggattgcttgtagatgcctctgctcagaaagccttgccatcgggccagataagtttttatcaagaaacgtgacaaacttattcataacgcttcctcctaactaattaattcatttacagtttttaataaagtcgggcctccaagtggcgtgtatgcttgcggtggaatgatgccacacggaatagattcctcctctgcaaatttttttacagagtcaaatcggtgtcttatttgaggtgccaccattacgacatcccagccattctttacttcttcctctacctcattcgttccaattgcatgcacttccatgttcacaccatttttctccgcttctttttttaaagcgtttacaacaattgcactggacattcctccagaacagacgaacaaaactttcatttattaatcctcctatacttataatttattacccttcaaatgaaaggaagtttcactttactaacaagcatatgaagtagtaaatgaatttagttataatgaaagtaaatttcattaaaaatatttttcctattaaattaatgtttcaatatgcaattttctctattgcaaagtcaacctcgcctcctatattattttaaataatcatatgatagggaggcgtataaatgatcgttaaacgtttattaatgatatgttgtatcgtcatcttgttcatccctttctctttcattccccctcactctacttatgctgaagtaaatactgcatacaaaaaacatgaattacgtgctgtatggattgcatctgttctgaatattgattggccctcaaaaactggcttacccattgaaaaacagaaacaagaatttataagattattagacgatgtaaaaagcactggtatgaatgcagttgttgtacaaattaaaccaaccgctgatgctttctatccttcaaattacggtccttggtctgaatacattacaggaacacaaggaaaagatcctggttatgacccgcttgcatttatgattgaagaaactcataaaagaaatatagaattccacgcttggattaacccataccgaataacgatgaatcacaccgatataaatcgattatcaaataatcaccctgcaaggcaacatcccaattgggttgtcccttatggcggaaagttatattacaatcccggtattccagaagtgaaaaaatttataacagaaggtgctttagaaatcgtgcaaaattacgatattgatgcgctgcatatggatgattatttttatccatataaagtagccggtgaagaatttccagatcagaaaacgtacgaaacatataataacggtagatttacaaatatagaagattggcgacgtaacaatgtaaatgaacttgtaaaagatttaaatactgctataaaacaagaaaaatcatatgtaaagtttggcattagtccgttcggcgtatggagaaatatagctgacgatccgactggctctaacacaaccgcaggccaaagaaactatgatgacctttatgctgacacacgtgagtggatacaaaaaggatatattgactacattacaccgcaaatatattggaatataggtttcaccccagctgcatatgacatattagtagattggtgggttaaagaaacaaataacaaaccgattcacctatacatcggtcaagcggcctataaaattaataataactccgtccctgcttggtctgatccagaagaatatccaagacaaattgcattaaaccggctatatcctgaaataaaaggtagtatgcattttagcttaaaagatattaataacaatccacttggagctaaagatagactctcaaaagacatatataaatatcctgcattaattccgcctatgccttggcttgatcatgatccaccaaaacaaccgactttaaaaggtgccattccaagagatgaaggtattgcaatcggtatcattgacaatagagataatgattctacttattacgctatttaccgcgcgaatgggaaaaatgaagtggatatacaaaatccgaaaaatttacttactactgtaagaaaaacaaaacttggagaaatttatgtagataaaaccgttatttctggagaaacgtatacgtatgtcgtaactgcagttgatcgattgcataatgaaagtgtggcttctagtcatactaccgttaatgcaaaataaaatctcataacaaaaagcgccctaaagctgtgatacttagcttttaaggcgctttttgttatttattcttaaacttctcagtcgctgctctcatcttcacatttaaatcgtgatcaattgagtcgcgaatatctcgctctactacttccatttctttttggaaattttccaagtagattttcagttcttcttctttctctggtctttgtgaaggtggtaattgtactaccaacgataacatggccgttaaatctttcattaagaacgtttcaagtttatgttgttgttcaaacatgcgttgctcttgatagtacggaagtgcattcaatactgaaattgtaatatcatcaaccgttctttgtaatgaaggatttattgagcgtttatacgcttgaattgtatttaatgcgtctggataacggtcataaaaatacaatttgtaaaatgataagtctgtcggttttacagtttgctgtgtctcttgtcttaagaaatctttcactttcatcgcagctacatcaatatcttcattcgtaagctttttcgtagtttttgccattacatgcacttttttctgcttttctttcggtaacatcgagaagacttgttctctcgtacgttgacctgatgcacaaaatagagtatttaatgtattttgttctttctttccttcagtgcgaatccagcgataaaacagtggatgttgtgtaaattcttgtagaaacggtattgatttgtttgataacttgtctaaagaatcttgcgctcttttatatggcttcgtccatgaaaaatacagcttccgtccgaaatatacgactaaaacaacgacagtaaatgctattaaaagcaatgtaccgagtagtaataatactgtttgaatgaaactcatttgttcacctcctctaataatccgttatttccttggacgctgaatgagtttctgcttcatctcatcattaaatgtgtctagttcaataacgaacttcttacttgactcgataatacgttctgacgatttttcagatgcttcaattgcagcgaacacattttggaatgattcacgtaatttatccatgctaatagcagggttttcaagcaattttgtcgtttcttctgtattttgttttaacgcttgagaattacttaataccatcgattcaattgcttcatttgtcgcattcactgcatcgattgttttccgttgatttgttaacgctaactgaatagcagctgaaaccgttacaacgttttgcgtcatcgtaattgcattacgaattgcctctgttaacttttcattatttttcttaataatgtctacagatgcgatagattgtaataaaacacttttcgcttgctgcatattacgtgtacgtacaagtatcttttctaacgcatcgttaattaatggaatatctctttgacgctctgggttttgtttctcagcttcaagcatgccagcaagctttttccctaagtatacttgtttatcaagcgcatgaattttatcgtgcgattgttctttaagcatttcaagacccactgtatcctcttgtaagttatcacggccaattagaagggatctaatgatttcctcgatttgtttatctatagattggtatttatgcacgtatgtttcaagtggatttttcttgaatactttaaacattattttcttcataccacttgctttaagtgaattgggatcaagctctgataccacttttcgtaattctaacaatgtatttggaatttcttcatttttcccattcatcatcgctgttacaggacgttttaatgctgacaacgtttgtcctgctgcttgttgctctttatctcctaaatctcctagctgagacaatacttttgataaatctgtattttgctcgctatttaacttttgtacataaagatcagcttctttattcagttcctctaattctgcatcttttataactgtatcaactactacttctacattattatctttcatgatcgatacaggttcttttttctcgagttcagtcaacaaaatcgctcctttatttatatgtgcgaatttatatgcactatatttcatctattatatcgtatttcatatacattctgattgcttgaaatcgatttttttagaaatgcctgtttatgcagtcattccctgtttcttactataagtatacctgtaaacaacataattttcctcagacttaagacctagagaacgacatgctgaaggcggattcttcgtatgttacgtatataaattatgttcttctatccttctgtactcaatcttttgacatacaccctttttcaatgtgataattatattgcgcccactcctatttcttcttgcgcgctacgaatgctccattttgaaatgccaataacaccgtttcaaacatttcatcttcttctatcatttttttaaactcggctaattcatttgcatgagaggttgcgttatcaacaacaagaaaaccctttggttgtaaaatgcgttttatatgctcaagccaccacatgtattgcgtacgctctgaatctaggaaaataaaatcaaatgaatgatctaattgcgcatctaaaaatgcccctgcttcttgattatgaacatcaatcctttgtaaaaggtttgccttttcaaaattgacaagtgcctctccaactcgttctgaagaaagctctacagttgttacatttccatttgtttcttctaccgcattagctaaccacaatgtagaataaccattagaagttccgatttctaaaatgttttttgcgctacacccttttactaaaattgataaaaattgccccatctcacgagtaatattccgtaatttttcttcccttgtttttttatttcgatcatgctcttctccatattgttcaagttgaaataataataaatctaacgtatccattttttccatcgcctttccaaagcaatatgatgaaaaagctcttgctgcccgtctactttcattatatgcgaaacaaaaacctttttcctgttatatgacaaagatttgaatttttttatagcatattgtttcgttttttggtaaagttaatttctacgtgcaattattccattcatattatttcatattaaaattgcagttattaaattatataaaccccatttaaatgaatcggtatttcaaattcaattaagcgcccttttcggacgcattttctttgtttatatatttccagaagaaaggatgcttacaaatgaacgtgattagcttagatgctgctagaaaacgaaagcagcataaaaaattaatgattactataccgattattacacgtatttatgaagaagacggggaaattaaatttgaggtagctggcgaaaaagatgtacctcttgaaatgttagaaaaataataaaaaacgcatttctgaagaaatgcgcttttttatatttttacatttaaatgcataagtttttcagggttaaccatcatataaatatttgaaattttctcatcctcaaatacaaacgaaagaacataagttactttattatttattgtaactataactcctggtataccattgaccattttgaaatcaacagtgtactcttctgtcaatcgttgtgcaatcccaaagaacaaacgtataattcgatccgcagaataaatcgggttaatcgcagtcgtaactttaccaccaccatcagctttgagtatagcatctgtttttaatacttctaacataccttccgcatccccacactgtaatgatgatacaaacttttcaacataagaagccattttctccgtgcttaattttgattgcttcggtttctccaacatgctttttcgagcacgttgaaagatcttcctgcagtttacactactcttatcaacaattgaagctatttcttcgtattcataactgaaaacttctcttaatatgaaaacaatcctttctacctcagataattgttgtaaaagtaataaatatgcggtggaaagggattctttcattataaatgactttgatggctcatcactctcttctacaattggctctggcaaccacatccctacatacacgttacgtttatgcgctgccgatcgtaatttatcaattgaacgatttgtcgccatcttacataaatatgctttcatattttctatagattgaggatcttctatattatttagcaagataaatacatcctgaacgatatcctcagcatccataacactcccaaggattctgtatgctaacgaaaataataatggttgatacgcttcatataactgctccgtttccatgatgaactgcctcactttcatattgctttaaaatgtataacgctgcacgcttcccgcttgctaccgcagcatcagctaatacttcatcatgccctacccaatctcctgcaacataaacacctggcatttcaggtatattagggcccgctttttcaacacggtcaatatgaggaaaatcatgtactactgttattttcggtaaatattgctgtgcaacaacttctcttttccaatttggatgtaacaactccatcgtactttccaactgttctttatcatcacgaatatgattcatctcgagtacaggattatagtacttaattagactcactacaattgatccatcttcacttaatttagctgctctcgattgatttgtgaaaaatataggttgatctaatcctaatacaaattgatgtgtaggattgggtaattgtctcaagccaatatctaatgcagcaacagtaaccggtacagattgttcactccatctatgcaaacttgttccttctgcaccttttattattttacaagcttctttcggcggagtcgtcacgatgactgtgcctacttcaaaaacctcatcatcaacacaatgtattctttgtttaccttcggaatgctcaatttccacaacatgctttttagccaaaaactgcaccccgatatcattcgctatagctcttaattttgttattatcgtctcccaaccaccatctacataaagcactccctcttttatagaaagctgtatttgctttagtacagatgatgctaattgtattgtaggagcaaacgtatatgttgttgttcggcatagcgcataaaatatattgcgaaccattggatcttttatttcattttctgcccatgtagttagactcattttcggaacttctcctacatctaaatttcctaaacgaatcataagacgtgagaattgtacttttgcagaccaagaaagtagtggtgttgataaaattgagtaaaaatctgttgggatagtgaatatatcccctttccatattccatgtgcttttgtagatggtattccacctggaagagtcataccaagctcattaaaagttataaacgctgccccgcctctatataaagcatgtgcaccaagattcatgcagatttcatttttatttgtagtcatccctcggccaccgaattgactggacttttctaatacaatcactttccttccagctttcgctaaatatatagatgctgttaatccagcaagcccaccgccaacaattgctatatcaaatgtattcataataaaatccctccttaatcgttctacatacaagacgaacgattaaggagggatgtgacataaaaataaatttttattatcctactttatttcattactttttaattcgatcatattgcatacgaaataactcaattgcaaatggaatatcctcttcactctttaaataataactaatccatcctgattcaggtaatacgtgatgtggttttaccaagccttgcttcactaattcatctcgctttaactttggaaatggtaaatcagctaatttatcaccatgaagatggccaagttctttcttgccataatttatttcaataccaccaaatcgatgcggtttttcagaaacacccgcccagctgagtacttcatttctaatcatttcactaaatgacatgaacattcactccttataaatgattgatgtaattttaaattaacattttcattacttttttccatcaatccaaagtatgaatgggaatacgaatatagtttggtcttaacaccttattctttatggaataagtgaatttattaagctaccgacaacagcacaaaacaaagactagacacatatcctaattttgtaacctaacttacctatagaaaggcgggtaatacaattgactgccaacatcgactatacctccccctcaaccaattttacttatgatgtaaataaaagtaatttttttcggaaagatgcccaaaattatataaatgtacttggtattaaacaattaaatactttagaaaatacttctttattagatatttatttaagtacaggaaatgttgtagaaccacatattcatcaaaatgcagctgaacttgtttattgtatttcagggtctgctgttgtttctttacttaatccatttacgaatcaaatattaaacttaccgataaaacccgggcaagttgccaacattccacaagcgtggtggcattatgaaattgctacagcaaataatactcatttattagctattttcaatgctccagcgccagaagttattttcggttctgacattttaagattaactcctgctcatatgatggcacatacttactgcctcaatgaacaacaatggaaacaagcggtttcccctattcaatcaactactgtaattggtcctccgtcaaactgcaatcaaaaccgtgaaatgaaaaattatccaacccagcccctcgctcaacaacataatccgcatcaccaagattcttattacttccctctttactggggctattaatttgtaaattttcaaaagaatcatcatttatctcctaggaaaataccaaggagatttttttattgtatcttctcttcctattaaaaatagtaacaattgatagtggacatacatataatatttatatattaaattggaggtgatagtactatgagtaattataactatcgaaaaaactactcttataataaaaatagtagttcttcagcatcctctcaatcttccaattcccaatcgcaaagagacttagcggagcaaggctatgtaaagaaaaaaggatgtaactgtaataaaaataaatagtttatcttatggatgaattcttttttaaaagaattcatctttttttactgatcggaaatttttaaagttacataacttattacttaaatgagaaagggtaaattatacttttttatacgaacttaacaaagagtaattgttcaattaatttattacttattttcctaaaaaatatagtccttcctaaatttattaggaaggactatatacaaacccctgtttaatttcctactaaacattgtaacaaattaaacgatattaatacctgcacttacaaatccagcaactgcagctattggacttgctgctgttaatgaaacatataacagtattttatccccagctgctactggaatagcttcaggtatgattcctgatgctgtagaaccaatcgctattgcggcaaatgctggcgttaataatagaggtgcaccttgtactgtaaacgtattgcttgctgcaggtgcagttaatatttgtatttgcacttgaacaggtgataatggagataatgcagctgttgcactaaagaaacctgctaatgacgtaatagttcctgcgcgtggtgctacaaatgcataatcacctacacctaatgctaatgtgatacttgttccacccgttaacgctataccaggctgactaaatccaaatccgagaagagttcctgtattagctactaacgcattaactaatgctgctggtgttgtacctgaagcaaacggaataatagctccgccaccagttgcacctgttgctcctgttaagcctgttgcaccagttaaacctgttgcccccgttggacctgttgctcctgttggacctgttgctcctgttgggcctgttgctcctgttaaacctgttgctcctgttaaacctgttgctcctgttgggcctgttgctcctgctcctgttgctcctgttgctcctgttggacctgttgctcctgttgctcctgttgctcctgttgctcctgctcctgttggacctgttgctcctgttgctcctgtcgctcctgttgctcctgttgctcctgttaaacctgttgctccgcctcctggacctgttggacctgttgggcctgttgggcctcctcctggagtagcaccaattaattgagttaataaatttaataaaagttgtaaacttgcagggtcaataattaaagagaaaaagaatggtgcaagagcactgtagaattgttgtaataaagaaagtaattgacttagatttgggttaggagattgtagtaaattaataatactttgaattaattgttttaagaaattcccttctggagaaggtgctaattcatttagtaagttcaatagttgagtaaacaaattgagtaaagctaatctgtttgcatcacttggatttgcaaaaaacgctgcaatagccgaaattaaagagtttagtaaagtaattaatctacctaattgctcactagtaatcggaactgtttgtggattgttacaacactctggagtgaaaacaatcggattattgcagtggttatgaccgaaacaattattacttgtcatttatgtcctccttacttgttttatatttgagtttttcctattataaggatcataaagttgtaaaagagtatgtgttatatattgacttaaaataggaaacatgaaatataattaaacttgcaaacgctatttaattatgttcatgactcacatattaattatatgtttttaataattgactgcttagattaaatacctaaacttaagagtttattttatttttccacgtttatctcttaggttcaaagacacattttaatttgaatacaaaaaccgaatttacgattaacatatattccgcaagtaacaacatcattttttcatataaataaagaacatttccttactaaaattgggctcaccttataaaggtgaagccgtttctattataaaaaactctcatacaatatagtggacaagttattttatacttcgttctaataaaatattgtaaggagtgaaaattaattgcctatcattcaaccatttatggcatctagaagatttacatccacactaggagccggcacaggtacaggtgcagcttttgcaattgctgccacagcttgtttaaacgatgcgggtactactgcaaccgcttttccgactttcacgtattacaacttatatgtgaacggtattcttcaaccaagcgtgaactccagtgttactactggtcctactggtgctattacaattcctggtggggatgcattagacggcggaattccaattacaattgaatttatcgtcacttaatgttaacgaatgtaattcagaacaaaaaagacagattccttttcattaagaatctgtcttttttaattaataataataaattgtaaaataattgaagcaccttgcgatggtggttggttatccaataaagttagtttaccagtactaacttcatagaatggttgtggttgcaaaattccattgataaacaaatttatatacgaaacctcagtaggtgatagtatattcgttgtaccatattgagctatgccatctgcatctgtatatataagtttctctccatctgaaaaagtgtaaaataacaaattagttgttgttatagggccaatccccccagtaggacctgttgctcctgttacacccgttgctcctgttgctcccgttactcccgttggtcctgttgctcccgttgctcccgtttctcccgttactcccgttggtcctgttgctcctgtttctcctgttgctcccgtttctcccgttgctcccgtttctcccgtttctcccgttattcctgttattcctgttgctcctgttggacctgttgctcctgttactcccgttgctcccgtttctcctgttgctcctgttgctcctgttgctcccgtttctcctgttgctcctgttgctcctgttgctcccgtttctcctgttgctcctgttggacctgttgctcctgttgatcctgttgggcctgttgatcctgttgatcctgttgggcctgttgatcctgttgggcctgttactcctgttgctcctgttgctcctgttgctcctgttgctcctgttgctcctgttggaatatatattggtggaagagctgaaaatgtaggtccaatattctcaggttctatcttacctttatttattgataatttatcattccgcttcaatttaattcctcattccacatatttttaattaacttacataagtatgagtctattattaagaaatgctttcataactattcttttttccttccaaatgattcatacatatattaaacattttaccgttgctataactcctattaatataataaaatgatagttccattccaaaaacacgaaacttattgcattctaatttaaaaatgaggtaatttatactcaagataaaaatgaaaaaagaatagaaaaactagtatcaacgactcttgaaattattcttccatacagacttactgaacctaccagaaatactgggtcaatagttacaacaaactctatgttcgctaataatacattaggtgatcccatcactgtgatattaggcggaactaatattcctctttctaataaccaaagcctcggtaattttacaattaacgcctcaaacgatatatttacaattcctgtaaccagaagatagcatttaacctatcaagttaatacgacaactgctctactcgctggaacaaaactactattaaacgcttctactccacttcctggttctattttttctcccgctatatcaacttcaaattataacaataatttaattgccgatactacaatttcacttcaattattcgacgtattatacatcgttaatttggttggaggtggttcaacaggtgcctctctaacaattatacgaatcgatttaaaaatgattcattctttttctaataaacattattaaatactaagtctgtcatgataagaacctcccaattatttcataaaagtggtggcgcattaaagaacaaattgcactatattcatagtagaaactatctatactaaattttccgtatatatattatcaatttacactgacttccaccgatgttacattaaatatgaagacagtttcttttttacgaaccatctcaatacgtatttgagaaacgtactccaatcctatacgcgagagcaatactatgttgacactcagatgagtgtctttttttgtgagtaataaaaaataaaaaccatctcttaaagatggttttatcttttgttactataaatgtaaacttatgcagttggataataaattgtcatgcttaatcgagtcaaagattcccctaaattataataagagtgtgatctatcggccttaaaacgaattgaatctccactatttaatttatattgacagttattcaattttactgtcaattcaccttcaaataccgttataaattcttctgcgccttctttatgcccttctgaacttaatttcccttctgtttctatttccactgtatacatttcaaaatgtctatcatcttgaaatggaaaagaaggatacactttatattttccattgtcttcagacaatacttgaatatcttttcttaaaatcactttcgtatcaggctgaggattattgattaaagaagtaaaagaaactttcaagccatttgcaattttccatattgttgttagtgtcggacttgattcccctctttcaatttgtccaatcattgttttacttacacctgttaattgagagaccttttctaaacttaatttttctttttcacgtattgattttaaattttttgccagaataagttgaatttcttccataaaaaacactcctacaccgcatacaatataacgaccgttatgtataataaaaagcacacgttatattgttctttttgatcattataacatacaaaaattgggaggttttgaaatgcctatattttcttttttgttatttgtatttataagtagcttcacacctggtcccaacaatttcttagctatgacatacgcaaatcaacatggattaaagagaagcataaacttttgctttggagtagcattcggttttttcatcctcacttctttatgcagtttctttaatattgttttaattaatattatccctataattgaatttcctttaaaaattttaggtgtcgcgtatatgctatatttagcctttaaaataattactagtaaaggcggtgcagatcacaatgaaaaaaataataaaaacttatttacagtgggtattttcattcaatttgttaatccaaaaggaatattattcgggctcacagtagtctctacttttatactcccctactacaattcatattcaagttttctgcttttctcattatttctaggtatagtcggtttactaagtacatttagttggagtttatttggttcaatattccaaaaaatattagtaaaacataaccaattattcaacatcattatggctgttttattagttttcagtgccgtttcaatcgttatacactaattcgatgctcattttagattttgtactttttaataccactctttatcaatcagactactttatatactaatccatccacataccctatgtggtttaaaacttttaagaggaaaccttctaacaataggtttccttccatatcatattaaataagaagcaggttaaatacggaggtgattttgattaagactactttaatttctcatttttacaatgaagaatatttacttccatggtggttaatgcaccatacaaagctatttgatcatggcattcttattaatcgtggatccactgatcgttcagttgaaatctgtaaaacattcgctcctaattgggaaatacgaaactcaaaatcactcgaatttgatgcttatttagttgatcaagaagttatggaaattgaaagagaaattacaggatggaaaatggtattgaatacgacagaattcctgtgctgttataataaagaacaatttttcaaattacttagcactatgggtggcaatatgttttcaataagaatgattatgatgattgatgaaccaagttatggctacactaatccaagatatagctctccgcttgttaaacaacgttatcacggcataataactcaacctaatccaaaccaactatatcttaacggtagattaattcacaataattcgcacgggaactatagagtcgggagacatggttcgcattatccttatagcatttacatggaacctgcttttatttttaaatttttttatagtccatggaacgatgcaatgaaaaaacgaaaattacaaattgggccgactctttctcaacatagtgtacagcgtggactaggttcacatcacttaacaacaattgaaaaattagaaacaaaatacaaattctatgcaactttaactacggacctccggttattcccagaataccaaattatatttcctgacctttatccttaatgtcatgaatatttagtttccacatccatccgttttttattaacatatcaactccaactaaatatttttctctagtagaaatctgagctaggactcttgctgcgcgcagattcctcttatttaatgtcgtatcaccagcctataatctttcataccatttcattgagtacctgatgttggattagaaataaaaaatggcaattcatttggaaaattttcaatttcagattatataccttctaaaacaaagtattaaaacaatagaacctaaactaatgtcttaagttatggctttatttttttcttattattcactttaaaatctttttataataatattgaaaaatacagtataatataaattactgttctttgggagggttataatgtctgataagtataaaattttcattcttattgttaccgcatctttttctttcttttccttaataaaagatttccgcaacacttcaaaaagtttcttttggggtagttttgtaattcttacaagcttcataatacttttaacactcgctttagatttaactcaaatactcctatattcagcgcaaattgcgcttgaaattattacaataccacataaactctttctaccatctgtcactgaagccgctattatttactaaaaaagtattttaattttcttatgcatgccaaaatatattttggtaaatttgacacacatttatatcaaacaagcatattttattgtatggtgactatctaataatacaaatttttaattttcataagatctttttatttttaattaaaaatttacaacattctaaaacagtatgcacataatatcctccattccctttttcaacatgacacttgtctcagagcgcctttaaaagcgctctttatctttaataaaggttttattaaaatttaggttaaaaattaataccctatagtcataatagctatttactgtttccaaaataagttgcattaataatatagaaatgaaatacctataaaaattattactttactatttctttaaacatgctagtgaggtgatttcgatagattatcaaaacaaagatatgttcattaacttttcacttttagatattaaccgtattattctcccacattctcctactggggctaccggctctactggagctactggagctaccggacctactggagctaccggttccactggacctactggacctaccggttccaccggacctactggctctactggttccactgggactaccggggctactggagctaccggggctaccggggctaccggggctaccggttccactgggactactggctctaccggggctactggagctactggagctaccggggctaccggttccactgggactaccggggctactggggctactggagctactggttccactgggaccactggagctaccggacctactggagctaccggttccattggacttactggctctactggttccactgggactactggagctaccggttccactggacctactggacctactggatctaccggatctactggctctactggagctaccggttccaccggacctactggctctactggagctaccggttccaccggacctactggctctactggttccactgggactaccggggctaccggttccactggacctactgggactaccggggctactggctctaccggacctactggacctaccggttccactgggactactgggactaccggggctactggagctaccggggctactggctctactggttccactggacctactggagctaccggttccactggacttactggctccactgggactaccgggactactgggactaccggggctaccggttccactggacctactgggactaccggttccactggacctaccggggctactggctctaccggacctgctggacctaccggggctactggctctactggttccactggacctactgggactaccggttccactggagctaccggggctactggctctaccggacctgctggacctaccggggctactggctctactggagctactggacctactggttccactggacttactggctccactgggactaccggggctactggggctaccggggctaccggttccactggacttactggctctactggttccactgggactaccggggctactggagctaccggttccactggacctaccggggctaccggttccactggacctaccggggctactggagctactggttccactggacttactggctccactgggactaccggggctactggggctactggttccactggagctaccggggctaccaggatcaaactctccaataaagttagtttgtctagcatctaaaataaaaattgacgtttcacgttgtttgtttcgttcagttttcaaagaactacttcgtcgctcagaggcgactttattaatataacatttcgttatattttcgtcaacaacttttttcaataagttgtttttcgtttgttttgtttgttacctttcgtggcaacgaatataaatataccagtttgattattaaaatgcaatagtttttctaataaaatttttaacttagtaaaaaagtataaaaacagcacatttcttctatataaatataatttctcgcactatcaagatttactatacccacgcaactcatgctcaaataaaaaaagctttggagaaatctccaaagcttagtcttgtttatggcgcatagcagggaataataatacatcacgaatagatggtgcatttgttaataacataactagacgatcaataccgattcctaatccacccgtaggaggcataccgtactcaagagcttcaatataatcgtcatccatcatgtgagcttcgtcattaccttgttcgcgctcttttaattgcgcttcaaaacgttctttttgatcgattggatcatttaactcagtgaatgcatttgcatgttcacgcgcaacgataaataattcgaaacgatctgtaaatcttggatcttcatcattctttttcgcaagcggcgagatttctaccggatgaccgtaaataaatgttggttggattaatttatcttctactttttgttcgaagaattcatttataatatgaccaacttccattgtatctttaatttctacattatgttcttttgcaagttcacgcgcttcttctacactcatcggattccagaaatcagctccagagtattgcttaatcgcatctaccatatgaagacgtgtccattctggttctagattaatttcataatcaccatactggattgttgttgtacccagtacttttttcgcgatatgagcaaccatatcttctgttaacttcataatatctttataatcagcgtatgcttcatataattcaatcatcgtaaactcagggttatgacgagttgatacaccctcattacggaatacacggccgatctcatatactttttctaaaccacccacaataagacgctttaaatgtagctcaattgcgatacgcatatataattccatatctaacgcattatggtgtgtagtgaaaggacgcgcagaagctccacctgcaattgcatgcatcataggtgtttccacttcaagataaccgttgtcatctaggtatcttctcatctcacgaatgattttactacgagtaacgaacgtttcacgactttccatacttgtaattaagtctaagtaacgttgacggtagcgttgttcaacatcttttaatccatggtatttatctggtaatggacgaagagatttcgttaatagcgtaaagcctgttgcttttactgaaagttctccaacgtttgttttgaacactttaccttcaatacctactaaatcacctaaatctgctgttttaaataattcgtactcgtcatctccaacagcatctttacgaacataaatttgaacttgtccatgtaaatcttgaacatgtgcaaatccagctttcccttttccgcgttttgtcataatacgaccagcgatagaaacagcgatttccttctcctctaattcctctttagagaactctccatatagactcactaagtcagttgttgaatttgtgcgttcaaatcttttaccgaacggatcaattccttgttcacgtaaattatgtagcttttcacgacgaacaatcaattggtcgtttaattcttcgtggttcatgttatccatgatattgatatcactccagctctatttaattttacaatatatacagtatagcattttctactcaactagaaaaactgccagcaactaactggcagctcttctttctttcacgtaattataggaagtgtatagaagaatgtcaatctcctatgtccattattaaccaacgtaaattgtttgttgtttcgcttccacttcttctacaaatgtacctaacacattcgcaaggtcttcccgtgtgttacaagcattaataccattacgtacactcgcattaccacgaacaccttttaaataccaagctgcatgttttctcatctctcttacagcgacactttcattctttaagtcgataagacgatctagatgcaacatacatacatcaattttctcgcgcactgttggttccggcattaattcacctgtctccaaatactttaccgtacgataaatcatccacggatctccaagagcagcacgaccaatcataacaccatctacaccaatttcatcaagcatacgctttgcatcttgcggcgttgcgacatcaccatttccgataaccgggatatttacagattgttttacttgtttaataatatcccaatccgcttttccttcatacatttgcactcgtgtacgtccgtgaaccgccacagcttggccaccagcacgctcaacagccctagcattttctattgcgaaaatatgttcttcatcccaaccgatacgcattttaactgtaaccggcttttcaacagcatctacaaccgctgctaccatttcatatattttattcgggtctaaaagccaccttgctccagcatcacatttaacgattttcggcactggacaacccatattaatatcaattatgtctgctgtcgtatatttatctacatatttcgcagcatctacaagagtttctttttctccaccaaaaatttgtaaacttaatggcttttctctctcgtcgatatataacatatctaatgttcttttattattaagtaatattgccttatcacttaccatttcagcacaaactaatccggcaccaaattcttttactgttaaacggaatgcagagttacacactcccgccatcggtgctagtacaaccggatttttcatctcgatatttgcaatctttaacaatcaatctactccttcctgtacaatcactttggcattaattcctctatcgaaacatttaatgccttagcaacttctactacaaaatcttgagaaggcgatctattccctctctcaacctcacctaaaacagatacagatacccctagtgctttagcaaaaccttcttgtgtgtaaccttttagctttcgaaaagcacgaatgcgccttccccatttttctgcttccataccgttactccctctcgccttttcatttcttctacttgtgaacatgaaatgttttgttttatgtcttgattaatttctaacaacggaacgataacaaaagctctttcaaacatccgcggatgcggaacaataagattctctgcttcaatattctcttgattataaagtaaaatgtcaaggtcgatagtcctcggcccccacctaatttccctttttcttcctaggtcattttctactttttgtgttactttcaataattcttgtggtgataaattggtagaaatttttataactaaatttaaaaagcaactttggtcagtatagccaactggctcagtttcatatacagatgaaatatcatcaacctgaatataaggatttttatttaaaaactgaatcgcttcggttagatacgtataacgctctccaatatttgatcctaatgcaatgtaagctatattgttcatggacgttctctcgtaatttctactgctacagcacgataatgacccggtatcggtggatccggcttaattaccttaattgtacagcgcgaaatactttcatattgttttaatatatctgcagcaatattttcagcgatactctccacaagcttatactttctatcctcaacaacttttctacataattcgaaaagctctccataattgaccgaatgctctaagtcatcactttcccctgcacgctttaaatccaactccaccgttaagtcaactttaaatctctgacctaatttattctcctctgggaacacgccatgataaccataaaactccatatcatggatataaattttatccaattaccttacccccttaccaatcatcgcatccatcattttagccatacgcgccatttctttcacatcatggacacgaacaaactcacagcccttttcaataccaagacaaacagtagctcccgttccctcaaggcgttcctctactggcaaatctaatacgtgcccaataaaggactttctcgaagtacctaagagaaccggataacctagcacatttaactgttctaaattacgcatcgcctctaagttctgctcaggtgttttagcaaaaccgatacctggatctaaaataatattctcatctcgcacaccagcatttttagcaattttaatactgtcatacaaatcagcaatcatatccgccattaaattacgataattcatgtcatcgcggttatgcattaaaatgatgggtacatcgtaatgagctgcgacttcagcaattttcggctccgccttcgctccccaaatatcattaataatatgagcaccagcctcaattgcttgctttgcaacttcagctttatatgtatcgatagatataggcaattttacttcttttgaaactgcttgaatcatcgggacaactcgctttatttcttcttctactgatactttagcaaaacccgggcgagtagattcgccaccaatatcaataatatgagcaccttcaccttgcatttcttttgcgtgacgtaccgcagcatctacctcgttgtaactcccaccatcagaaaacgaatctggtgttacatttaaaatccccataattaatgtcttttcatttaaattcaatgtatattcgccgcagcgtaaatcataatcccacttcaaactacacatctcctcttcgtaattcatttttgctccataatttctctctttgcattccataaaggtacattaaactttttgtaaccactcctactttacccgggaaatcctgcgcttctatacgataaagcggaacaatttcttgaatggagtttgttacgaagacttcatccgctgaaagcagctcatcttttgtaaagaaaccttcctttacttctatatttaattcttcagcactctttataataaacgcacgagtgataccatttaaaatccctgtctctaacgaaggtgtatataaaacatcacctttcacaaaaaatagattggaaacaataccctctgcaacataacctgcttcagtaagaaaaataccttccttactcacaacatttccaatttcacgcttccctaaaatattatttaaataatgatgagacttcagacgaaatgttccttccggtgtatttcgcacttgttttagaataacaccttctttttccactacatctcctggagctgttaaaggttttataaaaacaataaccgaaggctcttcatacatttccgtttgtaatcctatttcatctatacccgctgatacattaaaacgtacatatgcatgcttcaattcattcttagcgagtaaatctttcaaaataagcatcacgtcattttttgtcattgtccatttaatttgcaatgtatccagcgcttctattaaacggtcataatgatcatccaataagaaagggtgaccattataaatacgaaacgtttcaaaaactccaagaccatataaataaccatgatcataaggagaaattttcgcttcacttgcttctacatactgaccatttacgtaaattaacataacgttgcacttggactgtatttacaaatgaaattctgtaacaactctttcccatgagaagtcataatagattccggatggaattgcacaccctctatcggcaatgtcttatgacgaagtgccataatttctccttcctctgtccaagatgttacctctaagcaatcgggtaacgtctctttcttaacaataagggaatgatagcgcgtcgcagtaaacggattaggaatatccgaaaaaatcgtctttccatcatgatgcataagcgacgttttcccatgcattaatcgttctgcacggacaacctctccaccaaacacttgtgcaatggattgatgccctagacaaactccaaaaatcggaatctttccagcaaagtatttaataacttccatactaatccccgcttcattaggactacatggacctggagaaatcattagaaaatctggtttcatattctcaatatctgaaatggtcacttcatcgttacgtttaacaacgagctcttgtccaagttctccaagaaactgcactaaattaaatgtaaaagaatcataattatcaatcattaatatcatttctctcacctaaccgtttcttcgctacgttcttttgcacgccataaagcaatcgccttttttaacgactctttatattcattttctggatttgaatcaattacaattcccgcccctgcttgtacatgagcttttccatctttagcaagaagtgttctaattacaatattcaattctgtatctccagaataaccaatccaaccgattgaacctgtataaatccctcttcgaacaggttctaattcctcaataatttccatcgtacgtattttcggggcaccagtaattgttcccccagggaatacagccttcactaaatcaaaagcatctttatcttcttccacctcaccacgcacattagaaacaatatgcataacatgtgagtatttctcaattaccataaattcatctacttctacagtgccatatttacaaacacgtcctaaatcatttctttctaaatccacaagcattacatgctctgctctttctttttcgttctcaattaattctcttgctaattcttcatcctcttgctcatccgcgcctctagatctcgttccagcaattggtcttgtacttacttcagttccttgtttcttaattaacaactctggcgatccactaacaatttgaaaatccccaagctccaggtaacccatatatggagatggattaatttcacgaagacttgtataaatttctagtgggtgtgtctgtaacgttctttcttgtctcgtcgacaagtttacttggaacacatcacccgccccaatatattcttgaatacattcaactgccttcataaagccggcttcagtaaaagcaactgcttcacttttcttttcaggactttcaaagggcacagtcacttcaggcgcttctgtcatccaaagactcttccactcatttagccgttcttttgcctcttcatatttatctacataatgcgtaataacccataacacttgttctttttgatcatagacaaatacgtcatcaaataataaaaagaagatgtcaggtatattaatatcatcttccgcaagagaaggcagcttttcaatataacggatacagtcataactgaaatagccaattgcaccaccttgaaaaggcggatactctgggttatagtccgtcttccattgttccatatattcttgcattaaatctaacggattccctcgttttattgtttccttaccactttcacttatatgtaacgtttcatccttccctcggattaccgctactgggttcagccctacaatgttataacgaccgccacggccactttctaacaaaatatgttgcgatttaccctgagaaagaaatttatattgcttaaagaaatctaactgatatggaatagaaagcgctaaagattttcttcgttgcatatcaacaccccgtcttcttttatcccaccctcttagattaaccagctcaaactacataagttatttatatagagattgattatactcgaaggctagtgaaaataatttaattatactacctcttattttacatgaagttttctagtcattcactcttttcctatttccaatcccaaaagaaaaagcaccctttttcaaggatgctttttcaatcgcgtttaattatgattcaaattgataaagtggtgtacttaaataacgttcaccgttactcgggataataacaagtacctttttccctttacctaactttttcgcaacttctgttgctgcataaataactgcgcctgaagagataccaactaaaataccttcctctttagccactcttctcgcatattcaaatgcttgctctgttttcacttgaataatttcatcatatacttctacatccaacgtctccggaacaaatcccgccccaattccttggattttatgtggacctggtttcccaccagataatactggtgaatctgcaggttctactgcataaattttaatatctttatacgcttccttcagtacttcaccagcaccagtaatcgttccacctgtaccaatacctgcaataaacgcatctaattggtcacccatttgttcaataatttctggacctgttgttaaacggtgaatttctggattcgattggtttttgaactgttgtggtataaagtagccatgctcttttgctaattcagtcgctttacgaattgctccacccattccttcaggccctggagtcaatactaattccgcaccgtaagcacgtaataaattacgacgctcaatactcattgtttctggcattactaagattgcattatatcctttagcagccgctaccatcgctaaaccaattcctgtgttaccacttgtcggctcaatgattgtatcgccctcttttaataatccatttttttcagcatcttcaatcatagctaatgcgatacgatctttaacgctactccccggattcataaattctaattttaagtatatatctgcgctgtctgattctacgatgcggttcaacttaacgatcggcgttttcccgattaattctgaaactgattgtgccactcgcattcctgtcactcctaacaccgagtatttttattggttttatctatatttagattttgtcagaaaattccctgtttgtcaattcatttggaggattgctcctcttaattcccttattacaaattctcgattaaatttgtaatatcttctttagagaacttgtatcgttcattacagaaatgacagtgaacttccgtctcttcctcttcttcacgaacttgctctaactctgttttacctaaactaattaacacactctcaatacgctcgcgtgagcatgtgcaattaaattgaacatccattgtttctaatacttttactttatcttctccaagaactgcatatagtagctcttccggagaaagtccttgttcaatcaacgttgatacaggtggaatcttttgtaaacggtcttcaataaatgaaatcgtttcatcttgcgcacccggcataatttgaaggatgaatccacctgccgctaatatgctatcatctccatttacaagaacaccaacacctacagaagaaggcgtttgttcagaaactgcaaaataatacgtaaagtcttctcctaattctcctgaaacgattggagattgaccaataaacggctcacgcattccaatatctttaattacagttacaaacccctctgtacctaccgcttgatatacacgtaacttcccttgttctgttccttcaaaatcaacatgcggattcgttacataaccacgtacatctccatttgcatgagcatctactaagataggaccaatcggaccgttaccttctaccttaatcgttaacttttgctcaccttttaacattgcgcccatcattgtacccgcagttaaagaacgccctagtgccgctgaagctgttctccatgtatcatgacgtctttgcgcctcacttactgtatttgttgtacgtacactatacgcacgcacttctccatcaaacgctaacgcttttactaaataatctttcatacgtatttattcacctttctcatgctgtaaatttgcattacgttcatataacatgtataaaccttttaacgttaaaaatggatctacaatatcaattacattcgattcttcggaaattaattttgctaatccacctgttgcaataactttaggttcttgtctagcttcttctttcatacgcttaacaataccttccacttgtccaacataaccataaagaatacccgattgcatcgcacttactgtatttttcccaactacactgcttggttttgtaatttcgatacgaggaagttttgctgctctgctatataaagcctctgctgaaatcataattcctggcgtaataactccacccatataatgcttttcttcgttaatataacaatatgtagtagccgtaccaaaatcaacaataataagcggacttccatataagtggattcctgctactgcatttacaattcggtctgcgcctacttcacgcggattttcatatttaatatttagccctgtttttatcccaggccctactacaagcggtttaattttaaaatatttttcacacatgcgctctaaagcaaacataattggtggtacgactgaagacacaataatacctttcacatcttcaaacgaaagaccttcatgctcaagcaattgctttacaagcattccatattcatcttctgtcttatgacgatctgtttccatgcgccaatgctgacgaagttccccctcttcaaacacacctagtacagcatttgtgttccctacatccaatacaaaaatcatattctcaccacttatcttatttaatctatatttgtgcagtatgtataaaacttataaaaacatcatatcacacatacttatataatcagctttcctatcctcatcattttacaaaaagattgctctctatttcaatttttaatactagttttacttaaattactttatccactaagttctcaatagtaattaacaaaggttttaacaaacaaaaaaggagtgacgatagtcactccttcgtttcttacttatcttctttatcttcatcgtctttcttcatgttgatgtttactttcacatcatctgaagatgttggacgttctggcaatctgccgtaatcacataaatgattgatttgctcagcatctaacgtttctacttcaagtaacgtttttgcaataagatctagcttatcacgattttcagtaagaatgtcttttgcacgagcataacattctttcataatcgtttgcatttctacatcgatatcgtgcgcaattgcatcactgtagttttgctctgaatggaagtctcttcctaagaacacttgaccaccttgcgaactaccaaattgcattggtccaagcttatcactcataccgaattctgtaaccatacgtcttgcaatgcccgtcgcacgttggaagtcgttgtgagcacctgtactcacttcaccaaatacaatctcctcagctactcgaccaccaagtaaaccagtgattttatcaagtaactctggctttgtcatgaagtaacgatcttctttcggaagcattactgcatatccaccagcttgaccacgagggacaattgttactttatgaacgacatcagcttcatcaagaacaacaccaattacagtatgacccgcttcatggaaagcaacgatattacgttctttttcagagataacacgacttttcttagccggacctgcaataacgcgatccgttgcttcatcaatatcactcatatcaattatcttcttatcttgacgcgcagctactaaagcagcttcgtttaataagttttcaagatcagcaccagagaatcctggcgtacgagttgcaattgctcttaagttgatattctcatcaagcggtttattacgagcatgcaccttcagtacagcttcacggccatttacatctggacgatctactgtaatttgacggtcaaaacgacctggacgtaataatgctggatcaagaatatcaggacggtttgtcgcagcgatgataataataccttcgtttgcaccgaatccatccatttcaacaagtaattggttcaacgtttgctcacgctcatcatggccaccaccaagacctgcgccacgttgacgccctactgcatcaatttcatcaatgaaaatgatacaaggagcatttttctttgcattttcaaataaatcacgtacacgtgatgcaccgacaccgacaaacatctctacgaagtcagaaccactgatagagaagaatggaacgccagcctcacctgcaacagcacgtgctaataaagttttacctgtacctggaggtccaactaataggacaccctttggaatacgagcaccaacttcagagaacttacgagggtctttcaagaattcaactacctcaacaagttcttgtttctcttcatccgcaccagcaacatctctgaaacgaacttttttcttttcatcattatataacttcgccttacttttcccgaagttcataacacggctaccgccgccttgagcttggtttaataagaagaagaataaaatgaagatgatgacaaatggaatgattgaagtaaagaatgttacccaggcacttgtttcttctgctggttgatacttaacttcggcacctttcgctttatcattaattttcttttgtaattcctcagtatttggtgcataagtaacaaattgttctccttggctagagttattaaattgtccttttacctcaaatacaccatttttcggttgaagttgcacattacgcacttcaccgctttctagtttagtaatgaatttgtcgtagctaactgatgtcgttttttgtgtcgaaccattaaaatagctcacgattccaattactactaagaatatcagtaaataaaagatggtattacggaagatacgattcattcctaacctcctctcacggcataaacactatagtaaatcgtaacatagaaaaactttcctatacaattgtgaagcctatatttaattaatttgagtaaacgcttggttttaatacgcctacataaggaagattacggtactgctctttataatctaatccatatcctactacaaattcatgtggaacagtaaatccaacataatccgctttcagatcaaccttacggcctgttggcttatctaataatgtaacaatttttacagacttcgctttacgatatttgaataagtctactaagtagcttagtgtaagaccactatcaataatatcttcgacgattaaaatatcgcgaccttctacagaagtatcaagatcttttaaaattttcacttcgcctgttgaaactgtagagtgaccgtaactagatacagccataaaatccatttcaagatatgtatctgttctctttaataaatctgccatgaatggcattgcgccttttaatacaccaattgcaagaggtactgtgtttttataatcctctgcaacaattgcacctagttcgcgcaccttttcttgtatttgctcttcagaaattaatactttttcgatatcttgattcatcatttcattatcctcccggaagactccttgcttttgtagtgaataatcatatatttatccttctttgccatctctttcgaaattgcaaatgcagatcgcttcaacaagggtacccaaataatggtcccacttgcatcacaaacgaccggccattcttctcttttttctttcggtacttttgcttcgataaaaatagcttttatctttttcgtgccattcataccttgtattgacatgcgatctccattttccctagaacgaatacgaagtggatatgatatatcattatacttagcaacaaatactgtttcattcatgttacttggtatatcttcgctcacctctgttacaaattcatccccgttcaatagcgtaatggtcccgggtactgataaatcttgtaaaaaaggagaaacaatttcttgtttaaatctaaagctacactcctcgtatgtacgaacaattttcaaatcacctggaaaatcaagtgaacctgaaggttgtgtccgcttaaaaaactcaatcaccttgtcaatatgtatggaagaaagagaagatggaatcttatattcataaagatagtttaatattagttgaatccctcttctttgtaaaggcatagacatggattcaaaggcaggaattgataagctaatttgtttatcacttttttttgtaattactttattcattttctcaaaagctaattcctgcaaataagcctcatcctcttgcatctgcacgctaaatttttggaatttctcatgcacttgtggattttcttctttcaaatgaggaaggacatatttacgtaatcgattccttgtatatacttcctttttattactcggatctatacgtggcattaaatttagcttattacagtaatcaacaatttcttccttcgttaccccaagtaacggcctaattaaatacccattatgaaaaggacgcttcactgcaattcctgcatatcctttcggagtactccctcttacaagacgcattaaaattgtctcgacttgatcatctccatgatgtccaagagcaacatatcttgcatcatatttcttcattattctttccaaaaatgcatatctgcattctctagcagcaacctgtgcattcattccgtattgctgttgatattgtgatacattaatccttatcgtttcacaaataattcccagttcttcacaaaggccctgcacaaaccgtaaatcctcatgagattcatcacctctaaacatatgatccacatgagctactacaattttcaactgtttttccgctcttttttctaataaataatataaaagcgctaacgagtcaggaccaccagaaactcccacaacaattgttgaatcattctttaatacatcatgctgctttacaaagtcatctactttttcaacaaatgtatctttcaacttcgtaatcacctttcattaaacaagaacagcaacgttagttgccttgtctacaatggtacaacttttacaaacattgtgcaaaaaaaagatatacaaaaattacatttttatcttacatcctccgtgtatattcacaaaattaataacattacctttttccacaaaaaaacctaggtattcacctaggtttttaaaatcaaattatagataaacattccacttacattttactgcgcctgcattcctacaatcggaatcgtagcccacttcggcatatttttcttcacttttgccactacaatagtcatatcatcatttatataaccatcacaagagcgaatcacttcttccataatgatatcagcaatttcttgcgggtcttcggtttgcaattctttaatttttcgtttcatccacaattcatgattctccacatgctgtgctccttcaaaaatcccatcgctcatcataataagaatatcgcccgtttttaattgttcacccaccacatcaacttcaacatcttcaatgattcccatcggcaaattacttgcttcaattttcaaaatattatttgcgcgtttaacaaaactcggcgtcgatccaatctttaaaaaccttgcactcgcatcccgcaaatctaccatagctaaatctaacgtcgtaaacatctcttctgtcgttctcaaagaaagaattgaattgatagacttaattgctatttcttcatcaatgcccgattggagtattttttgtaataatttcaccgtttccttactttccatatgagccctttgcccattccccataccatcactaattgcaagtgcatatttaccaacacttaaatccatcatcgcataagagtcacccgaaacaaatccaccgccttttgcagctgtagccaatcctgtatcaagagaatacgtcttcgccgaaccaaatgatattaaactatggccatttggataagaagacttttcttcatgtttaacgacaatattttctttaaggatatccgaaagcatcggtgcaactaacttttcacattcaccatgttcattagatgcaactggaattaacatttcaatatcaatacttcctctatctaaacaataaatatcaacatgctctacttcgacaccaaaatcacggaatgcttgcataatctgttcttcctgcacttgatgattttcacgctctcgttgtatctccttagcaaaatcctccataacctttgatacacctaatagttgctccgctactattctacgattttccttcatttgttttcgtaatttttgtccctcatagaagtgatctaattcacccgctactaaatccgtcacttttttccctctcacacaatgcttgtcccactcacgaactaatttacgattatgttgcagggttccttcttccgtttcattcattatttgtttcatataatcgtacgttttatcaaaattcactacccagcattgatcctttttaaagcatgtttgacatgttttcgcagtaattgtactcaaaaacaaatctgcttctgtctctttatcttcttcctctacatacccatatacagaaaagctattagataaagcagcaaatacatttgcaaattggttgattttatttgctgtaacatcacgcatccttcttaaatattgttgttggtcttgcgaatgctcttgtgtacctggcataaatttagcaatacgatccaaaacaagcttcggtgttaataagaagataacaatcgctacacctgactcaattaaagttgttacaatatttgtctgtttgtccacatataatgtaattaagcttgtcccaattaataaacctaaactaacacctaaacgcttcccttcttttaacaatccaccaagcaatccagagaaagcaagaaggctaagctgagacaagctagacacatttgctaaacttaatattagtcctgttacaacccctactgtggatcctgtggcagcacctgcaataaatgcaaatactagcactaaataccttgtaaaaatatgttgaatagaagcatcatatacaaaccaatctgttgtacccgttaaaacagatgctagtaatataatcaaacaaacaatttcttccgtctctaatgcctgttgttttcctttcctttccactaaaagcgggacgctttgtaaaaatatcatagttaatacgaaactaagcccagcctcaatggtactaacgagtaaatcgtacatggtgacagtttgttgcgcaaaatatacaacaactaagtgtgcggttaatgcggagataaatacttgaaatggaacaagtccaacagttttacgtgtaaatcgactaaagaagatattataaatgaagaaggtaaagatagatgcaaaggtaaaaaacaaattatctatcgataccgaaagagctcctcccattagagctaaaaatgctagcggcatcttatcccgcttcataacataaacagcagcaaaaaatggcagtgcaaacggtaaaatatttgttaatatatatgctcgtcccaaaagaaaaccaataacaacaataataaatccccatctaaagaaaacttgctcaaatttcattcgcaacttactcgtccactttattcctccaagctgactctcattcattgccaatgcacttgtattcatagtattccttcctgctttaggcatatttttaacaccacctgcatagtttaattactgtcattataaaagatgattgttggtttttttgtcaaaacaacagttttcacttttataatcgttcgactttttattcgaaataactctacagatatacacggtatgtaagttatttttgagattttaattaaatattcagaaaatatagggtgattttgtagaagtgttgtatatcttaatttatttaacaaaaaaagatcatgcaaatttgcatgatctttttagatgacccgtacgggattcgaacccgtgttaccgccgtgaaagggcggtgtcttaaccacttgaccaacgggccgttaaattaaatatagcggcggaggggatcgaacccccgacctcacgggtatgaaccgtacgctctagccagctgagctacaccgccatgtcgtcttatttaacggacaattagtatcttacatcagatactaattaaagtcaacacatctcaaaaacttttttaaaaatatttttaacatataaaaaagcaccctgagccatcactctgggtacctctctatatgttaaaaactaaacgtccttattatccgcgacgcgcgccacggccaccacgtttagactctgtgttacgctttaaagaagttaaacgatcttcgctatcttttaagaagcgtgccatcttttgctcaaatgtttctttcggagctcggtcgttaccgccaccgcgattatctctgttgaaagagcgattattacgttgtggacgtccagaacgttgttgatcaccaccgcgttggtattcaccgcgtggacgatctccttctgttttttcacgttctttcgcttttttgatagataaaccaatctttccatctttttcaacattaataacttttacttctacttggtcgcccacttttaagtgatcgttaatatcttttacatagttatcagcaacttcactaatatgaacaagacccgttaagccctctggcagctccacaaaagccccaaaatttgtaatacctgttactttaccctgtaacttgctgcctacctcgattgacataaaaaaaatgctcctccttagtggttaaaaagtcaaattttactttattatatataatcctaaaatatagtgtcaataagacatactctacttagaaacaggaaaaattatctcccctttaccagagaagaaataatcccttctagcaatctttaatacgtactcttcatcatttaacttttgaacttcgtcttttagacttttttctttattcgttaatgaatccagttcttttttcatgtccttaacttttgcttcttttgctttaatggaactgttttgttgataaaacgttacactaatactcgcaataattgtaaaagtaaagacaagaaaaaccgctaaacggcgataaagtcgcttcctgttctcatccgtttgtattatatgctctttaacaggatttggactctgtttttcgattgttctttgtctcagttccctcatttccgaggtccccctaacttcttttttatatgctcccatagttggaagatatgtcccttcaattttgctatatattgcaggaaccctatatgtttcactataaaaagtttaacacgattagggagaagtttccatatgagcgaagcaataaatcgaacaggccagaaaaaaactttccatatgaaaagtaatatccaaatcaccattttccataacacatgtccaattgaaagcagtatacgaaataagaataatataaatgcaataaatagctgcgctataataataacaggttttatcatgagtagctgtataattcgaacaaaaaaatatgttgtttgcataaaaatatagatgagaaaatttaacagcttcatgtatagtgccttcagtaagctttgatatgccgcaaaaccacataataatgccaaaaacacatatatacgtagctcagcttcatttacgagaagcaatacataaaagacggataatgcttggacaatccaaaataatatatcatgtataaatacaagccaacgtttacgttcttggcgctttaaaaaacgttgatatgtatctaaagacgctccaatccaagcacccattccaatcattgaaagcattgtatacaactgaattgttaagctcatttaaacaacttactaaagaaacctttagttttttccccttgattttcatcaatatacagcatctcattaactttccctttaatcgacacaatacctttttccacatctaaatttttcatttgtaaattttgaccacgaattgttaaaaaacccattacggtctctagtaaaaactcttcgctatcaaaactctctacctgcttcacaccggtaatatcaattatacgcctgccacgcataataatgtcatgctctacagaaacattttgttgattagaagacgtaggtgagtaaccattattcacgtaaatccccccataggtttttactagctaatagtaatgtatgaggggataaatgattttagaacaagccttcttccgcttttactttttcttcacgaactaagctatacatatttgctgcatcttcttttttagttgtttcttttaattcatttattttcacagtcactattttttgaccaaaacgaattgttaattcgtcagctactttcacatcagaacttgcttttgccacttgaccattaatagatattcttccttgatcagctacttctttcgctaatgttcttcttttaattaaacgtgatacttttaaaaacttatctagacgcatatcaaatccccctattaacgctctgtctgtttcgcttcttcccataaaacatctaactgttctaatgataaatctttcatctctttattcatttcagctacttttgcctccatgtataaaaaacgaccagtaaatttctcattagttgaacgtaacgcctcttctggatctattttgtaatgacgagctatattaacaaatgcaaatagtaaatcaccaaactcacccagcatctttttctcatccatatttgtaacctcttgttggaactcttgccattcttccaaagctttctctatcatcggttgcacatcaacccaatcaaatccaaccttaccagctttcttctgaatttcataggcgcgtagtaactgcggcaaacttttgggaacgccatttaaaacagattctttcacgaatcctttttcttgttttttaatttcttcccaatttgcaatcacttcatcagcgctgtttacatccgtatttccaaacacatgcggatggcgacgaaccattttctcagatagagttcgaatgatatcatctatagagaaccaaccttcatcttctccgatttgagcatgaagcataacttgtaataatatatcacctaattcttctactaagtgatcatcatcctcttcatcgattgcttccaacacttcataagcttcctcaattaaatatttctttaatgattgatgtgtttgctttttatcccacggacaaccatttggaccacgaagttccgcaataatttctctaagaacatcaaactgttgatacaaggacgcacgctcctgaactggcggcacgtacacactcgttaaattattcaattccgtttcatgatctaacatgtacaacggtaccttctttacttgttcaaatgaagttcctgcagctgttacgatatacacttcataatcatctggtaacatctccattaatgttaatttcacatcagatgcaacgaatgcatcatatacttggcaaaagattaaatgttgacgcagttctaattgccctctttcaaatgatgtagcatcaagtaattggaatccttcaatcggatcaatctttagacttgcaaacataggatcaaggaaactttgtccaccctcaattcgcacttcaacatttgaaacttctcctttttccaacagtagctgaactgttctttctgctacaagtggatgcccgggaacagcatagataatttctgtaccttcagcttgttctagcaatttattcgcaattgtttcatatacaatttcaaacgtatcatgtgcttcatatacagcatcaaaagacgtatattgtacgccttctttctccaattcttctataactggatgttctttcgttctaacaaacagatggtctgcttcttttatttttcgatatacacccatcgttagctgatctaattcaccagctcctaaacctaaaatagtaatgattccactcacaaccagtcacctctatccactcttcttcaatgaaccttcttttttctcttgtttcataacggttcctaattctttttttgtaaatacacgtaatttcaaaataaaaaacatatatgtcaatccgccaatggctacacctaacaacgcttcaagtgtcgcgcttcctctatgttccatatcaattactaatccagacatctgtaacacacgtgtgaacatcattaatacaaatcccatacagataccactaattactatccctaacatatttcgcttattgataagtgaccctgatacagctctcgtaagcaacaaagtatttagtccagagattataattaacgcacataaagtcgcaaaggctgcacctttcacaccaaaataaggcatgaatatataatttaacgctaactttaagcaacctccaaatacaacaaataatgctggcttaaacgtttgccccaatccttgtaaaatagaagctgtcgtaattgacaatgaactaaataaaatagataacgataaaatagataaaacatctgatccatcactgttttcaaacaacataatattcgtaggttgaataatacaagttagtccaatagctgctgcaagtccaataacacatgttattttcactgctaactttaccttttcttgaataaaggaaagatctcctctttccttcgccgctgtaataatcggaataagtgacaacgagaaagaagtcgtcacaacagtacctaattgcattagcggaatacttctatcataaacaccctttaatacctttgcattttcagcctgttctcccgcaccaataagtaagctgtaaaaggacactgaatcagccatctgtataaaaataagcactaaattactaacacaaatcgctaacccctgccaaaaaaggattttaactatcttccttttacccttaattctcgctgcacttttgaagaatatagaacgaaaatcttgacgcatatacaatataagtacaataatcccaataagaccacccgcaattgagcctaacatagctcctgcaccaactgtatataaatcaaatccgtgagcaattaggaatagcgataaaaatacaataatagaaactcgaattgtttgttctattacttgcgaaacagccgttggcatcatattattaaatccttgaaaataccctcttgctacagacaaaaatggcatcaataagaatgaaaatgaaataacacgtagtaacttatctaagtgtatatcgcccatagctaccgcaattgtttcggccccaaaaaacaatgtaaagaagcctataaaaccaattcctaataagaaccaaaaagatacacaaataatttcttctgcttctttttgttttccccgctctaatcgttctgcaaccattttcgaaatgataacaggaaatccataagtagctaaaattaaacaaaatccataaaacgggtaaatttgttggtaaatataaaacccaatatcccccgctatattttgatatggaatacggtaaaaagcgcttaatacttttgtaacgaaacttgcaatcgttaatataatagccccacgccaaaaggcttgatacttcttcgcttccatacaagaaaactcctttttctattctcacctctcgtattatatcataaagaaaagaacaaactcccttcccaacacgggtaataatgagttcctacacgttaaaaatattcaacgaaaaaaggtagcaaagtgctaccttcattcaatatacatatatctccaaataattgatttctcaaaaagaaagatcataattaggaaagattgctacttctaaaatcaatatacccttactgttccatttgtttcgctaagaaactggcagcagtattaaccgctttatgctcgatctcgcttataatagcttcttttgaaaaaataatgacggctccaatcggatctccgtttgcaacaattggtccaactgtataagaatgaaccttttctgttacaccatcaataatggaaatatcactttcatccgtcataataacagactttcgttcttccatcgttttttcaattaaatcgccaacacttttatttaagtattcttttttcgatacgcctgatactgcgatgatagaatctcgatcacacacaagcacattatgtcctaagctgtcatataaagcatcagcatattcttttgcaaaatcacctagctcactaattggagaatacttctttaaaattacctctccatcgcgatcaacaaatatttctagtgggtctccttctcgaatacgtaaagttctacgaatttccttcgggattacgaccctgcctaaatcatcaattcgacgtacgattccagttgctttcattctaatgctgcctcactttctactgatgatcaaagtggtgaatttacctgttcatgtaaaaatcaccaactgttagatatagtattttacacattagttcttctatgcacgtcgaattgtatttttttatcttattttaggcatttattacttctttttttacatctggtaagccttttaataaattttcagcaatcgttaaccacttcgatgtctctaagccatttgttttcataacaattttcaattgtgatccttccattcctaaaccaatcatacgtccaaaactatttccgagcatgaataattttccaccatcaatattttgacttgcttgttcagaaaacaggaatgttacttcaaatttattctgcttaattaattcaatttgttctttcattgccaacactttaatatttgcaatttgtaataaataaccaacttcttgtggataatcgccaaatctatcgatcatttcttcctgcaattcttcaatatcctcaattgcagaaacacctctaaattgtttatacatcataattttttgcttactatctgaaatataagcatctggtaagtatgcatctacctctaagtcaatttcaacattaactatattttcagccccatctgttcctctacgctgttcaattgcatcttttaacatttgagaatatagatcaaatccgacagaatcaataaatccatgctgttctgcccctaacaaattacctgctccacgaatagataaatctctcatcgcaattttgaaaccagatccaagttccgtgaactctttaattgcttgtagacgcttctctgcaacctctgacagcactttgtcacgtttatatgcaaagtatgcatatgcaacacgattagaacgtccaacacgcccacgaagctgatacaactgtgataatcccatacgatctgcatcaaatacaattaacgtatttacattcggaatatctacacccgtctcaataattgttgtacttacaagaacatcatgctgtccttctaaaaatgatagcataacagactctaattcgctttcgttcattttcccatgtgcgtaggttacgcgggcatctggaactaacatcgaaatttcatctgcttttctttcaatatcctctacacggttatataggaagtaaacttgaccacctcttgcaagctctcgctctatcgcctctcgcattaacgctggattatactcgactacatacgtttggactgggaaacgattttctggtggtgtctcaataacagataagtcgcgcacaccaagcatagacatatgaagcgtccgcggaatcggagttgccgttaatgttaatacgtcaacattcgccttcaattgtttaattttttctttatgtgtcacaccaaatctttgttcttcatcaataataagaagccctaaatctttataagtaacatctttagataaaatacgatgtgttccgattacaatatctactgttccatcctttaagcccttaattgtttcattttgttgtttcctcgtacggaatctacttaataagcctatattgattggataatcttgaaaacgctctcgaattgtttcatagtgttgctgcgcaagaatcgttgtcggtactaaaattgcaacttgtttttcatccataatcgctttaaatgccgcacgaatagccacttcagtcttcccataccctacatcaccacaaaggagcctatccatcgggcgtccgcgttccatatcttttttaatctcgtcaatagaacgtaactgatcctctgtctcttggtatgggaaagatgattcgaactcttgttgttctgccgtatctggcgtatatgcatagccttttgaagcttcgcgctcagcatatagtttaattaggtcatccgcaatgtcttgtacagatttttcaactttcgttttaacctttttccaatcattaccacctaatttgtaaactttcggatccttaccttcagatcctacatatttttgaacttgatcaatttgttcaattggaacgtatagcttatcattaccttgatatttaatatttaaataatctttatgaacaccattaatctctaatgtctcaatacctaaaaatttacctataccatgatttacatgaactacataatctccaacttttaattccgaataacttttaatacgttcagcattcgatagcttttgtttacgttgtgattttttaactttcttatgaaaaagctccttttcagtaatgacaacaagcttttgcatcggcatttcaaatcctgcatgtaaatcacctacagcaatttgtaaccttccaggcaataaaatatctgtaccttctacaatatctgcctcaatatcataatcacttaaaatatgttgtaattttttcacacgttcatcatctgttccgagtacaacagtcgtaaaatgcccttcattccatctatcaatttctgtttttaacaaattcatctgtccatggaaatcttgcattgttttacatgttacattaacaatattttgcggatgtgtgtgtgcgatatgacgcaagaataacgttaaatatacaaaacttctttttttatgatgaagaaacccctcgaatgggtgagagaaagataaatcttgaataattgttccttcaccaagaagtgatatataccattccgcctcttctgtttcaagatgtgatgctgtttcttgaatacgggaaatctcatctaaaattacaacaccatcttctggtaaataatctatcagactagcaggttctttatagaaaatagataagtatttaaacatctgttctatactttgcccgtttttcaacatctcaatttcatgacttaccgtctcaagcactttagtctttagtttatcatcagaaagtttttgcatcgtcttagtcaagccttcttcaagatgctgaattcctgattttaattcttcctgtgaaaataaaaactctgttgccggaccaaacctaacgttttcttttttaccttgagaacgctgttcatccacatcaaataatcgaatagaatcgacttctgtatcaaagaattcaatacgaaatggtagttcttcagttaaaggataaatatctaatattcccccacgcaaactgaactcccctggagcttctaccatcgacttacgttcatagccaatatgatgtaaagtatgcaagagcgcatctaaatcaatctcttgccctagattgatttcaacttgcttttgcttccacaattcttttattggtaaaaatctacgcaatcctgccactggcgctacaatgattccattctctcccgcagccaagcgatttaacacttctatacgttgcgccttcaattctggacttgcaactccaatttccgatgctatcagttcattcactggatataaccacacatctttttcaccaagtaacgccactaaatcttcatgtactttttgtgcttggtataagttatgtgtcacgattaattgtgatttttttgtttttttatataaagccgccattaataatgaacgagaagacgttgccatccctgatataagttgttcttttaacccatcttctaacccattaataaccgattgtatctcttcatttttataaaattgctctaataaacctatcatttttaaaactcctctcaacataaagagcaagtcattctattttatgcaaatattttggaaaaggaaaacagaaaaatgctttggacatgccaaagcgacaacattttattgcagaaatttttcatactcataatactcaggataagatgcgagcgtttcttgacacgattcacaaatcgtttttatatatatatttccattctcatgaaaatgaatcatttctactacttcttgctccgttagttgaaataaaacgtcgctatatactttttctgcgttaatggagcctacattacctccgcagtgtctgcaataataatacccttccatactagcctcctaaaaattcaattactactagtatgggtaaaacaaaagagaaatattcccaatctcatttttaactattgaaagtattcatgatttgaagaaaaggcttatttagccactcttcacatgcatccgctgctttttcaatagaatggttaacatccggaatctcttcagatgtaaagcgtcctaatacataatcgactaccttcattccatttttcgggcgatcaattcccatacggatacgttgaaattcttgtgttcctaagtgcgaaatcgttgactttacaccattatgtccaccagcactacctttcatgcgaagacgcaatttacctacaggaatgtctaaatcgtcgtacataacaacgaagtcctcaacatcaattttataataatccataagtggacgaatactttccccagataaattcatgtatgttagcggctttaataagattaccttttctccattaacaaaccctgcaccaaatacacctttaaatttttgttcattcaaagaaatgttccaacgcttcgcaagttcatcaatggccataaatccaatattatgccttgttaattcatattctctacctgggttcccaagtcctactatcaatttcattcttgtaccactactttcttttttcgatacgaaaagacgtaaccaattttggttacgtctcattctatccaattaattgaataatacactcacagattcttcttcgtatacacgaatgattgcttctccgattaatggagcaactgaaagttcatgtactttgtcgattttcttctcttctggtaatacgatagagttcgttacaactaactctttaatgtttgaattttgaatacgctcaattgctggaccagataatactgggtgtgtacagcaagcatatacttcagaagcaccgttctcaacaagagcgtttgctgctaatgtaattgtaccagctgtatcaatgatgtcatcaattaaaatcgctgttttgccttcaatattaccgataatgttcattacctctgaaacgttcgggcgaggacgacgcttatcaataatagcgattggcgcttttagacgatctgccatttttctcgcacgagttacaccaccatgatcaggagacacgattacgatatctttaagaccttttgtttcaaagtaatcagaaagaatcggtacacccattaagtggtcgattgggatatcaaagaacccttgaatttgtggagcatgtaaatctagagtgattacacgagttgcacctgctgtttcaagcaagtttgctacaagtttcgatgtaattggttcacgagaacgcgctttacggtcttgacgcgcataaccatagtaaggaataacaatattaattgttttcgcagatgcacgttttaatgcatcgatcataataagtaattccatgatatgttcgtttactgggaagcttgtagattgaataatgaatacatcgcaaccacggatactttcttcaatgttaatttgaacttctccatcactaaaacgatcaacagaacattttcctagtcctactccaatatgctttgcaatctgctcagcaagttccttattagagtttaaagagaatactttcaaattagaatttagatattgagtcgacatctagattaaccctccacattattatgattttttcttattcagcaattgatcaacatagtcttctttgttaacttgacgtgcacgtgctaccgataatgcttttgatggaacattctctgtaattgtagagcctgccgccacataagcaccatcttcaactgttactggagcaacaaggtttgaattacatccaataaataccccattaccaatcacagttttgaatttattcttaccgtcatagttcaccgtaattgaaccacaaccaagattcacgtcttctccaacttgtgcatccccgatataactcaagtgtgaagctttacttctattaccaaagacagtttttttgatttccacgaagtttccaacgcgtacttcgtctccaataactgaacctgggcgaatatgtgcaaatggaccaaccgatacttctgtaccaagcttactatcatgtacagtagattgtcgaattgtcgtacgatctccaatttcactatcgcgaattactgtatgcggtccaatttcacaatcagaaccaattacagtgttcccctcaataattgttcctggatgaagaactgtatcgctaccgataattgcatcagcagaaatataagtgttacttggatcaataattgtaacaccatttaccatgttctttcggttgatacggtttttcataataatttccgcttgcgatagagcgactctgtcgttaacacctaacgtttcatcgaactgctctgtttgataagctgatacgatatgaccttcattttttaaaatctcaataacatctggaaggtaatattcaccttgcacgttatcatttgaaactttagaaagtgaagcaaataaagccttattatcaaaacaatacgtacctgtattgatttctttaatagctaattctttctcatttgcatctttatgctcaacaatcttttcaacatgaccattctcattacgaacaatacggccatatccagcaggctcttctatgtatgctgttagcaccgtcgccattgctcctgcttctttatgttgctgaagtaatgcttccattgtttcagcagttattagaggcgtatcaccacaaataactaaagttgttccttcttcatttgcaagtacacttgcagcttgatctacagcatgtgctgtaccaagttgttctgcttgtaatgcaaattcacttacgttccctagctgttcttgtaccatttcagcaccatgtccaacaaccgttacaagtttctgcaatcctaattgagatacttgatcgactacgtgttgtaccataggttttccacatacaggatgcagcactttgtatagcttagacttcatacgtgtgcctttacctgcagctagaatcactgcaaatctgtttgacatatagaccctccatcgcaacctatttatccattaaagatattatcctaaatcatcatatatttcaagaaacacattttaactattaaattttaccataattcttataagatgttttactctttagtatcttttttaagaaataagctatactatttaaaatgattttgaaaaaattagtagtttcttctttttatgttaataaattatacagtttccaaatataaagcaaaaaaaacaaacccctgtaaatgcttacaggagtttgctacaaaattataaggctttttgtcaaaagcccttttcattcgaattttacgaagcacctgcttcttcaaactcaacctcttctaactcgcctaaacgatgatactctgttaaaaccgcatcttgaattttagagcgtgtaccagaattaattggatgtgcaatgtcacggaactctccatctggagtacgtttacttggcattgctacaaataatccattattaccatcaattacacgaatatcatgaacaacaaattcatggtctagagtaatagaggcaattgctctcatgcggccttctgtgtttacgcggcgtaatcttacgtcagtcacttccatcttgtgttcaccacccttttctaaataagcgatatatttgtataaattccacaaattttctattttccctttaattttttaaaaatttttaagataaaaatttttaaagtagttgaatatagagattagtggaggttatcgcttacaaaaggttacttaactagggcgattacttcaatttcaacggaaacatctttcggtaattttgctacttgcacacaagatcgagctggtttatgagtagagaaataagagctatacacttcattcacagcattaaaatcatccatgtcctttaaaaatactgttgtttttacgactgtatcaaatgaagcacctgcttcctctaataccgcttgtaaattttgaaatacttgttctgtttgtactgttacatctcctgttacaagctccccatttgccatcaatggaatttgtcctgagctatagaacatgttatttacaataatcccctgtgaataaggtccaattgcttgtggtgccttgcttgtttgaacaactttcatacttttcacccttttattatttattttactctttaaaaatagtgtacgaaaggcagtttgtccatctattttataatctataaataaaataaaaaagatagagctatctgctctatcttttattccgcctctacaagcccttcatcaaatggtgcaagagaataattccctttttccacttgaatcgttttttctttcacatcaacttccgatagacgaattaatgatacaaaattattaattagtcgttcttcaatatctgtggattctactaatacaccaataccaacaacattagccttgaattcttctagcatactcatcataccttgaattgttccgccagctttcatgaagtcatcaataattaaaacattcgacccttctggaagactgcgttttgctaacgtcattgtttgaattcgtttagaagaacccgacacatagttaatactaacagtcggaccttctgttaccttattatctttccttgcaattacaactggtacatctaagtaatttgccactgcataagcaagtggaatccccttcgttgccaccgtcataactgcatcaattggttgcctagcaaaaacagaagcaaacaaacgacctgcgccattaatatggcgaggattactcaataaatctgtcatgtataagtaaccgccaggcaaaatacgatctgggttttcaaataagccacaaagctcatcaataattagatctgcctcttcttcacttatatacggtatatatttcactcctcctgctgctcctggtatcgtttgcaatgtgccgaccccttgttgttcaaacgtttgcttaataataactaaatcttcactaatggaagacttagccgattgatacctttcagcaaaaaaagtgagagatactagctgacgagggttttgtagcaagtaataagtcatatcgactaatcttgtacttcttctaattttcatactctcacctcaaatcacgaatattctaaacaaatcataacgtattatacgtctttattcaagcgtttctcgctctcctaataaacgtaccgcatagacttgttcacaaaatccttttaatccgttataaatgcgatgcattcgtgaatcatggtgtacaagtccaaatacagttggaccacttccactcattaatacagcatccgctccaaatcgcttcatctgtgatttaatacgggcaacttcaggatgcattccaaatgttacatcttctaaaacgttaccaacagtatcacaaattcctttataatcaccagaatttatgacatcaaccattttatctacatttggatgtgtaactcgatttaactttaaatttccatacacatcagcagtagatacacctatatgtggtttcgctaaaataacccaacaagaaggcggagtctttatatgctcaattttctctcctcttccagtggcaattgctgtgcctccgtatacacagaacgatacatctgatccaatttctgcaccaagctctgctaactcatcaattgtaagctctaaattccataatttattaagaccacgtaatgtcgctgctgcatcactacttccacctgctaatccagctgctactggaatcgttttttcaatagtaatagatacacctttttttacattaaacttctcttttaataatttcgctgcctgataagctaaatttcgttggtcgtctgggacataccgattatgggataaaatttcaatacggtcttctgctaattccgttagttctagacgatctgctaaatcaatggttgtcataatcattttcacttcatgatatccgtcttgtctttttcccagtacatctaacgacagattaatctttgctggtgctttcactagtagcttcaatctattcacccactctatgtactcaatcttttatcgtttattttaccataaatttatagtaagacgatgacacttccctaattataacgaaaagcattcagaatgaaactacttatgtaaaatgatggcaccttttagagtacaaaaagccgaggaatgtctcctcggctaccgtagcacagaaagtatcttacaactactggtttcgtttcattaattgctgttctgcaatttctatagcacgtttcaccatgttaccagcatctttcgcacgaattccgccccatccttctttctgaacaacatcataaaagccaagctcttttgctagctcttctttaaattggtttgacatgacacctcttcgtctactcaatgcagagtccctccttattttgctacggtatagttagtatgcaaaataatatagcttttcatttatgggaatatatgtaatgatatatggattataaaatgacctcattatgagggtctccataaaatgttaactctactgtctctgttaaaacatctgcataactataagatacacgttgcaacgcatcttcttgttgatccaattgtacaacaaaaacggaacggtatgtttctgctagtacacctgattgctccacagtttttcttcttccactatttgcttttaacataagtcgctgtccaagatggtgatctaattcgcttttaatttcatctaaacgttttgacatatacttcgctacacctcgctgtaatttagattgaacacttaaagcacgatatatctatcctaattattaaccgcgattcacagctaatatcatcctgcgtttgaatagatagaagaaatactatattgtaaaagtatcattacgtagtctttacgttcttacctctttttatccaaattcatttaaatccttccatacaaaaagcaagatacatatgtatcctgcttactcttcgtaatgttgaaaaggtaatcccgttcgtaaaatccctctcgtttcaattccacctagtcccttttcaccagtaattgtattacgtacgacatcccatacattgactctctccataaatgaagtaaaactaattttaccaactacatatacaggatctagtgcatgaatattaattctagatggtgaactagcgaaattggcccctgcacgaattagtgcctcaaaatgtgattgacatgccccagcaaaaataacaagttgatccaatgatggatatttttttcgcacttcacgaacagcctgtacaaaatgccttgaatgcctatatgccgctaaatctcccttcactccttttgattttgtatatgcatcatgccctgtaataacgagaatgtctgggcgaaagtgatctattaagtctactactttttcatgcatcaccgtttctttacaatgaataccttgaacaggaacgccaattttattatataaatctaagcacttgcgcaaatataaagggtctccatctatatgcaatacacgtcccggcatttgaaaataatttacctcacttgtgtatccaccagttgaagtatgttcatgcctttgtttcatcagtacataatcttgttgaaacaaacgatacgtgcgctccattgtttctttctcacgcttcaccctttttttatgttctctttgatctatactaattaaatcttcaagtggcgcatccgccaccagtctaatttcctctccaaacaatatagctatctcgccttttatttctataatacgaaaaagaatatccctcttatgagaatatcgttccactaattctccaacatgtaaaaccattctcctacctccaaactcattaggccatcttacctgtttttaaagtatgaatttagagagcgaaaggtgacaaaagggacagttcaacttgaactgtccctttcatattcttatgataatttatgaagaactaatgcattacttaatgttgcaaactcttcaatagatagcgtttcgcctcttcgctttggatcaattcctacttctgttaaaattcgatccaataactccttatctttcgggaaaccatttaaattatttgataaattattcattaaagttttacggcgctgtgcgaaacttgctcgtactacttcaaagaaaaacgtttcatctgtcacctctacaaccggtttaggacgctttagaaggcggataattgcagaatcaacgtttggctgtggtacaaacactgtacgcggtacagtcataactgtttcaacctctgtatagtactgaatggcaatcgataaagaaccatactcttttgttccaggtttagcagctaaacgatctccaacttctttttgcatcataacaacaaatccacgaactggtaacttttcttcaagcaatttaaataaaattggcgttgtaatatagtacggtaagttagctactaccattacatcttgcccttcttcaaattgctcattaaatacttcatgtacatctgcttttagtacgtctttattaataactgtaacattaccatatggcgctaacgtctcatctaaaattggtaatagtctttgatcaatttcaaaagccactacttttttagcacgcttcgctaattgctctgttaatgcaccaatacctggtccaatttcaattgcaccactttctgaaccaatttctgcatgatcgacaatacgatttaatacatttgtatcaattaaaaagttttgtcctaaactttttttgaatgaaaatccatacttttcaacaatgtcttttgtacgatttggcgttgcgatatccttcattttttttcctcctgtattacttgcttataagcttctgcaaatgattcctttgaaacttgaaacatctgtaatcgtttatgtaactgttttgcatttgtataaccaatctttaataacttacccattctttctctgcggctctttgccatttctccgcccactaagcctgcatcgactaaatcactccaactaatttcacttgtgtaagcttccatttcttcatgtatattctctagagcacggcgaatcgactcattagaagcatgttcaatcccaacaccctttttccttttagcaagcgcttcttccttcggtaaaaaagcatgcttacagccaggaaccttgtcagaaataatttttcgaatacgctctccaggataatccggatctgtgaaaataataacgccccttttttgctgcgctaatttaacttgctcaataacatgatcaccgattgctgaaccgttcgtttcaattgtatccgcatcaacagcacgcttaatcgcaactgtatcatctttaccttctacaacgataatctcttttattttcatgcttgcctccacactcatttcgtctctacttagtaaaacaaaaaaatgacgacttttccattattattttccccattcttatattttaaaaaatagaatagaaaaatctttgttctctgtccttattgtaacacttcatcattcacatttattttcttgattacttctactagtttttctcaaaataaaaaagaacaggtttcccccgttctttttattcaacaccaaataaaacttttgcatttttagttgtcatttctgctacttcctcataagaaattccttttaaattcgcaatttcttctgctacgagttttacataactcggttcatttcgtttcccgcgaaatggatgcggcgttaaatagggacaatccgtctctattaacaatttctctaatggaatctccgtagcaacttctttcggtttcttagcgtttttaaatgtaactggtccacctaacgaaattaaaaagttcatatcaacacatcgctctgctacttctacgctaccgctaaagcaatgcataatgcctcctacttcagctgcattctcttcttctagaatatcgacaatatcttgagttgcatcgcggttatgtataataatcggcaaatttacttttttcgctaatgcaatttgtttacgaaatacttctttctgtatttcttttggagacttatcccagtgataatctaagcccatttctccaagtgcaacgactttaggatgagaagcaagttcttctaaccaagctaaatgttcttctgtcatgtcgattgcatcaactggatgccagccaaccgcagcgtaaataaaatcataggcttcagctaattccatcgccttttttatcgttacttcatcaaaaccaacaacaactgtataagtaactcccgcttctttcattcgggcaataacctcttgcaaatcttcttcgaattgctctgcattcaaatgtgaatgtgtatcaaacaacataatacataactccttttatattgaaatcaagtttattctacaaaaataagttctttaataacttaacgataacaatactacaatcttaatgcaaaaatagagagtgtaaaaagaaaaaagacgcttcacacatgttacacgtgaaacatctcttttcttgtcttaattacttgatttttgtaccatttggtagattttggtcaattgatgctaatgacaatacgccattctcttcacccgctaaaatcataccttgcgataattcaccgcgtaattttacaggttttaagtttgttacacaaataacctttttaccttttaagtcttccggcgaatagaattttgcaattccagaaacaacttgacgcttttctgtgcctaagtctagttgaatttttaacaacttgtctgcttttttcacaggttcagcagatagtacttcagctacgcgtaattctactttaaagaaatcatcaattgtaatttcttctgccttcggttcttcttcttttttctcttctactttaggagcagagcttttcatttgttctttaatgtactctacttccacttccatttctaaacgagggaaaattgggtttcctttttctacttttgttccagctggaatgcagccaattgtagatagactttcccaagatttatgagcttcatcagtaaggccaagctgagcaaacatcttgcttggtgctactgttaagaatggcataagcataatacctgtttgacgaagtacttctgctaaatgagccattacagaagctaacttttcacgatcattctcatcttttgctaatacccatggttgtgtttcatcaatatatttattcgtacgactaactagttgccaaatagatcctaacgctacagagaactccatattctccattgcttcttctacttttttcaaagtatcttgtgcaaacgctactaacgtttcatcaaattccgtcacattttctttaaatgcagggatttctccgttaaaatacttatcaatcatagctactgtacgatttaataaattacctaagtcatttgctaagtcgaaattaatacgctccacaaatccttctggtgtgaatacaccatcagatccaaatggaacttcacgaagtaggtaataacgtaatgcatctaatccgtaacgatcgattaatgtaactggatctactacgtttccttttgacttactcatctttccatccttcattaaaatccagccatgagcaaagactttcttcggaagaggtaaatctaatgccattaaaattatcggccaataaattgtatggaaacgaacaatttctttcccaactaaatgcacatctgcaggccagaattttttatatttctcttcatttgctgttccataacctaacgccgtaatataattagatagtgcgtcaacccatacgtaaataacatgttttgggttaccaggaacacgaactccccagtcaaatgaagtacgagaaaccgctaaatcttctaatcctggtttaataaaattattaatcatttcatttttacgagactccggctgaatgaaatgtggattatcttcatagaactttaatagtctgtcgacatatttacccattctaaagaaataagattcttcacgaacaagttctacatcatgaccactatctgggctttttcctccaactactttgtcgccttccataattggatctactaattgatgctctgtatagaacgtctcatcttgtacagaataccaaccttcatattcatcaagataaatgtcaccttgatctactaattgcttaaagattttttcgacaacatctttatgacgatcttcagttgtacgaataaaatcatcataagaaatatccatcttctcccaaagccctttaattcctgcaacaatgttatcaacatatgcctgtggcgtaatatttaactcttctgctttcttttggatcttctgtccatgctcatcagttcctgttaaataatgcacattataaccttgcatacgcttatatcgtgccatcgcatctcctgctactgtcgtataagcatgtccaatgtgtaattttccacttggataataaattggggtagtaatataaaaggacttattttcctctgtcattgttttggacctcccgaataacctcatatgtatttataaacagtatatcaaaaactcatatataaagtgaaactttaatcagtagggtttttgttcctccctactaattattagcccacattaattgggcttttacgagcagcccaaatctaacttatcttctttacgccaacctaattttaaatttaggtcttaatgctcgatatctttatcatctattgctcatatttcacaaaaatatacaatctccacttttaatttattattttttcagaaaataatgtaaataattgtggaatttcctctcaatctattatatataagaaataagaaatctataaatctttttaaaaaatatagaatttaagaattgacggaaatgtaaatgattggtatcatatgtccatagggtattttgtcgaaaaatgacgaatctaaaaatagactcgaaacttataaactatttatttaggaggaaaaaaattatgaaatctactggtattgttcgtaaagttgatgaattaggtcgtgtagtaattccaatcgaattacgccgtactttaggtattgcagaaaaggacgctcttgaaatctatgttgatgacgaaaaaatcatcttaaagaaatataaaccaaacatgacttgccaagtaactggtgaagtatctgacggtaacctttctttagctgaaggtaaaatcatcttaagcaaagaaggcgctgagcaaatcttaaacgaacttcaagattatatcgaaacagcaaaataagcttctcaattatgagaagcttattttttatcgacatgatagatttgatatacatctcttttcgacaaatctcgatctttagcgactgttttaatcgcttcttttgaattcatacttttttcatttatataatattcaatatgatcatataccgaaagagattcccaccattgttcttctggaacaggttcttctgttgaaccagctactaaaatacaaaactcaccacgtacttcattttgcttcgtccactcaattgcttcttcgattgtccctcgaataaattcctcaaattttttagttaactctcgacataatacaatctctctatttcccaacacttcctgcatcgaaattaaagtatcgtctaaacgatgaggcgcttcataaaacatcattgtagtttgtacataacgaagcttttctaactccatctttcgttcctttttgtttctctgcaagaaaccatagaaataaaactgctttgtttcaagaccggatgcaattaatgctgtaagggctgcatttgctccaggaagcggaattacatgatattgctcagctactgcctcaacgacaatatcgtaacctggatcagaaatacacggcataccagcgtcgctaacaagtgctacattctttccatcctctaatttctctaatagtttcttcccacttacttctttattgtgctcatgataactcgtaacaggtgtttcaatttcaaaataattacaaagttttttcgtttgtctcgtatcttcagcagcaattaaatcaacttcttttaaaattcggattgcacgaaatgtcatatcttctagatttccaataggagttggtactaaatataaaactcccttttcattttgttgaaagcttttttgttgccacatagcgttctcctttttgcatatatgcctctttttgttttctcgttaattgcttaaagtaatactccgcttgcatagctgtacgcttatcatcgtgggtctctacatattttaaaacaacaggaagcctgacgcgtgtatacttagcccctttgccgctattatgagtctgaattctcttttctatatggtttgtatatccagcataataacttccatcagagcactctaccacataaaaaaagtgcttattcttctccatataaaatcgaacgtagctcctttgtatattcgttattgctctcatatacaacgagaggcggtaaaattttcaaatctgcatttccatccttaattccttcaattaacaatgtatttgcttcttttccaaccttaggataaacaaattgcacacgctttggttcaattttatatttacgcattaatgtgacaatgtctagtaatcgccctggacgatgtacaaacgctactttcccaccttgttttactaactgactacttacagatacaacatcttctaatgtacacataatttcatgacgagctatcgctaaatgttcattcatatttttctctgaagtttgaggtgtttgaaaatatggtggattacatgtaacaacatcatattgatgacgcccaagtttctctggcatatctttcaaatctccatgtatgaggtgaattctttcctccaacccattgtattgaacacttcttactcccatatcatataagcgttcttgaatttccaccccagtaatatttccttttgttcttgtacttaatagaaggggaacaaccgcgttacctgtacacaaatcaagtaaattccccttttgaattggtacccatgcaaaatctgcaagtaaaacggcatctaaagaaaaattaaatactgatgggctttgtataatcttcatgtcttgtgctaataagtaatctaaacgttcatcttcatataaattcatatactgctccttttcttacccttaacctaccctatttcatgtataaaaaattacctttccaattataattggaaaggtaatttcactttttatttaagaatgacagacagaataaacaatctccctctttacgtacacttccataatgtagattgcaaatatgaaaaccttcttgatacagtctcgctaaattgtcatagccttcaccaatatctgttttcggcttcacttctttacgtttttgagttttttgtttttctttattctgcacttcttcaaaacggtgtcgcaaattgttattttccatttttatatgctggttttcttccaacaactctgcaagatgctgttttaactctcccaactgtttatataaatgtccaatttgctcttccatactagaaaccgattcaaaaatatcttttttctccacaagcacccacctcattaatctgtggtttgactcgaaacgacccctttattcactaactcatctaacgtatattctactatccgttccttgtctactagttccacttgaattaatctttctaaaatatttaatccgataacacggccagtaccatgcggggtttgtatacgttgatctaaatcaggaagttgttcctttgctgcctcatattcatcattctcatattttaagcaacacattaagcgaccacataaaccagagatttttgcaggatttaatgataaattttgatcctttgccattttaatggatacaggttcaaaatcccctaaaaaagtagaacaacaaagcatacgaccacatggaccaataccacctagcatcttcgcttcatcacgaacaccaatttgtcttagttcaattcttgttctaaaaattgcggctaagtccttcactagttcgcggaaatcgatccgaccatccgcagtaaaatagaaaataatcttattacgatcgaatgtatactctacatctacaagtttcatatcaagattatgctctactaccttttgttgacagacttgatatgcttctttggcagcatgtttgttctcttcaacaatggtacgatcattttcatttgcaatacgaataaccttttttagcggtaatacaacgtcgttttcatcaacttgttttttggtaataactacttttccgtattcaatacctcttaccgtttctacaatgacaaactcattttcagagatatcgaactggtttggatcaaagtaatatacctttccggccttcttaaagcgaacacctactacatcatacaaaacggtcatccctcctgcaaccgcaacactaactgttcgaacacaagctgcgcatttacattagcgttgattctattttttgcctctaatatattaaagagagctgatacaatgcgcttctgagcataggaaaacgattcaaacatctctttctgatcatgaaaaacaagacgatcttcttctccaagttgaacatataataaatccttataaataaggagtaacatatctaaaccttgctgtaattgttctttctctccaaagtgttttccccatttttcttgtacaaaaaaaatagaggttttatctttttcgagcgcttcacataattttatcactaaagctcgtgcttgtgcaaaccattcatcactacataaagctaaagcttcatcaaaactatttgtaagttgagcagcaagtgtcgataaagatgctgtaatcccttcatcctgtaatcttctaattaaagattccgtaggtaacggtctaaacgtaacaacttggcaacgagataaaatcgtatttaaaatttgatgactttgttcagtaagtaaaatagcagttgtatcactacttggttcttctaaaaatttcaaaagtgtatttgccgcatttgctgtcatacgatctgcgtgctcaataatatataattttttatttgcctctaatcctgtttttgaaaactcttcttgtaaatcatgaatttgctgctttttaatagataatccgtctggttttacaatatgtaagttagggtggttacctgaatcaattcgcttacagtttgtacatacatggcagggctctaccccattccgctcagaacagaggaaactctttgccatttgaattgctgtcgcaaactttcctgtccctttccctccctctaacaagtaagcgtgggatatacgctcttttgcaatgctattcatcaacatttttacaccgatgggttgtatagcagaaagctgctcccacgtcttcgtcataatgcatacctcacttatttcattctttccttctattataacaatttatcttctataatctgaacaacttcttctataagtttttccatcggctgatcagcatttaccaatacaatacgatccgagaaacgttctacaacttgtaaatacccttcgcgcacacgtttatggaaagagatatcttccatatctagtcgatttacttcacgtcctgcatctttttcaatccgagccaaaccaacctcaggctcaatgtctagataaattgttaaactaggcatacagtcctctgttgcgaaacgatttatttcaaataccttatccatacccaatcctcttgcatagccttggtatgctaaagagctatctataaaacgatcacataacacgaggtagttctcattaagtgctggcataactttttctactaaatgttgtctgcgcgcagcagcataaagaagcgcttctgtacgtgcttccatcatcgtatattcttgtttatgtaaaatcgtcctaatgtcctcagaaattgcaataccgcctggttcccttgtcgccattaccttttgtgcttttttttcaaaatatggcaataagcttttaattaacgttgttttacctgaaccttctgggccctcaattgttacaaataatcccttcatcctaaaacctactttctatatcatacactttcatatatttcgtattaccttgaaaacgagctcctgctctctctaaatacataatttgctctttatgctctgaagtaattctctctccatacataatcaatggaattccaggtggatacggaatcaccatttccgccgctatcattccaacagcctcttctatagatactatctttgtttcatatccgtctagttgtttatacgtatacggtaaaagagagaattcacctttataagtataacgaatagattccctcttgtctttcacctcataatgttgcaatgctactcggatcatctctataaccttcatatatccctcatttacttgtaagggtaaaataaataggacattgtacggatcagccatctctgtatatataccgaccttttcaaatacagactgtaattcgtaccctgataactgacaacgagtttgtacggtgacctttaactcatcttgcaacggatattctaaaatggcgatttggggaatagaacgtaattgttccttaaatcttcgtaaaaactcaacaatttcactgtgaccttcttcttttatacgcgccattgtaaagcgtgctatatccaaggaagccataattggatacgatggactactagattgtagcatacttaaataagtagtaaccttctcttcgtctactaagtgactatttatatgtaaataggaacccattgtcattgcgggtaatgttttatgtgcagaatgaactacaatatctgcaccatatgttaatgctgactttgggaatggttctcccaagcacagatgtgccccatgtgcctcatctaccaaaacagggattttatgtgcatgtgcaaaagcgatgcttgcctctagatccatacccataccataataattaggatgcgttaaaatgagtgctttcgcatttggatacttttcaattgctttcttaataatttcgttacgaactcccaccggtacgttataagcttcatcaatccatggatctaaaaaaatgggatttgctcccgcaagttttaaagcattaataattgatttatggcaatttctttgtacaagaacaatatcatgttccccacaacaagacaaaatcattgctaagttcccgactgttgaaccattaattaaaaaatagctcctctttgtattataaacttcagccaataattgttgtgcctcatctatacattcaaacggactatgcaaatcatctagtcctgctaactcagttacatcaatagatagaatatctttaaactctcttattgcctcctgagggaagtttaaaccattcttatgacctggaacatgaaaggataacggccctctttctttaaactctattaacgcctcatataaaggcatacgattttgattcatctacatctcttccttattattcattctctatctattatacagaacaaaaaaaataataggcatatgcctatttaaaaatatgatacttctaattttcgaagctgctttaaataatgtatatatttcggatcatctgtctctgtattcaccatatccttttcacattcatagcatattaaattattataaacatatataccttcttttctttttgtctcacaaacaatacaaacttcactttgtaatttcatagccttccctccctattttagtgaacctattttatacttctaatccttaacaatttacagaaaaatatacacccatctcttatataatatgattaactcttgggcaacgtgtttgtatcacccttacttctttcccgttctttttaacaatacaaaaaaacacaaatcaaatgacttgtgtttttagttgcttggcgacgtcctactctcacagggacaaggtcccaactaccatcggcgctagagagcttaacttccgtgttcggtatgggaacgggtgtgacctctctgccatcatcaccaaactatgaaggcatattccttcaaaactagataacatttgctacatattatatggttaagtcctcgatctattagtattcgtcagctccacatgtcaccatgcttccacctcgaacctatgctttagataaaatcaactctgtaaacatcaaacagtatcactttataagagatgttgaacgcttcgagtcaggggaatctattacactaccaattaattacggtatgattgcggaggactctgacgatgtattcaccacaccacaaaaagacgctgtaacactttatagctcggttgcaatttctattcaagcaatacaagaagttgactttaaagttaaaaatcttcaatttgaccacggtatgtggaagcaggaagttgacactcttaaagaacaacttgaagcagaaaaacttgagaaagtttcaatgaaagctgaaattgatgaattaaaggtattagtacaacaattaataaatgagaaaccagagcagccataagctgttttttattttgcgcaaagtacggctttgaataaattcaaatcatagatcaagaggggcgatatcgcttctctttattttgaggagatgattagtgtgaaacgaatagtagaccaagcaatttacgaaaagcatgttagccaaggaaataaaaacctagtcaaagattttctgattgaaaagaaagcacaaggaaaagcggcaagcactttaaagcaatacggttgggatttacgaattattttgtttctaatacatcaacacttcggaaataaaaatcttattgatttaacgcgtaaagatattcgaaatttatctattatttttcaagatatgaggatgtctaatgctcgtgtgaacggattaatgagtgcattaaggtccgcgttagagttttgtgcggatgatgatgactatgattatgaatttaatgtaggttcacgggtacgtggtttacctaagaatccagttagagaaatcacttttataacagaagaacaaattgagtggttaatcgatgagctaatagcacaagaaagatatatgttagcaacgtatttagcactttcttattacagtgcagctagaaagaatgaggtataccaggttcaaaaagaagggctgacagaacaatattatacaaatgtggtacgaggaaaacggggtaagaagtttagattatattacaatcaccgggtgcagaaatgcattcgtttatatataaatcagcgaggtaaggatactattccagatttgtttgtgcgtgtgtataagaatggtgagagaaagagattgaacaagagtgtatttaattattggtgcgatatatttgctaagatgctgaacaaaaaggaagggaaggaatttaaaatgaatcctcactgtttccgccatagcagattagataatttaaaagtacaaggtgttccacttgaaaaattaaaatcactcgctaatcattctgatatttcaacgactgaatcttatctgaaggatagaagtgaagaagatattgcagagatatttggaatggacccaagttatttcgcagcataaaaggaggctgaataaatgtcagaacaaaaaaatgatgactttaaagaattattagttggattaaccagagtggaaaccaaactagatacacttggtaatgttaaggatgttgcaattgaagcgcagcagtcagcgaaaagtgctcatttaagaattgatcgattagataagttagtgttttggattggtactacagtagttggggctattatcaccggtgggataatggctctttttaaattcgcagggaagtgatcgtatatacggtcactttttttatttggaggaggtgagagtatgaggaactttgatgcagcttcaattagtcgctatgtcgtattagtgattgctgtgattaatagtgtcttaaatcttgtgggataccaaacgattgatgacaaaatgacaaatgatttagttgctgtaattacaggagcattcactttgtatatggcgtggaagaacaactatttgagcaacaaaggattacaacaaaaaaatgtattagaaaaaaatgacttacactaaaaggagatgtttaataatggaaatcagaaaaaatttagttgatgcaagcaaatatggtactaagtgcccttatacaatgaatccagaattcattactgtccacaatacttataacgatgctacagcaaataacgaagtggcttatatgattcgtaatgataaccaagtatcgtttcatattgcggtagacgataaagaagctgtacaaggtattcctttagagcgtaacgcttggcattgcggtgatggtggcggtaacggaaatcgtaaatctattggagttgaaatctgttactctctaagtggtggagatcgatattataaagcggaggataatgcagctatcgtcgtagctgggctcatgaaacagtacaatattccaattagtaaagttcgcacacatcaatcatggagtggaaagtattgtcctcatcgtatgttagcagaaggacgttggaatagttttattgaaagagtccaaaatgcatataacggtggaggtagtccagtaatgccaactcctattccaccttcaaacgatggtacaaaagttgcttacattaatggcgataacgtgaatttacgaaaaggacctggaactggatatgcagttattcgtaagttaggtaaaggagaatgctaccaagtatggggtgagtcaaatggttggctaaacttgggtggcgatcagtgggtatataatgattcatcatatattcgttatacaggagaaaatgcaccagctccttctaaaccttcaaatgatggcattggtgtagtaactattacagctgatgtattacgtgttcgtactggtccaggaactaactatggtgtcgtaaaaaatgtgtaccaaagtgaaagatatcaatcttggggatatagagacggttggtataatgttggcggcgaccaatgggtttctggtgaatatgtgaagtttgaaaaataaaacatactatgtaacagcaagtgaagcctatgtgtatgtaaagtaagttaaaacaaatggtggcgtagtcccattagtagttcatggagcatttattttattccgagctggaatggcagccagtatctatgagcaagaaaaatatagaaaaaaataaaaaagggtacgttaatcaaataacgtatcctttttcttataaaatacgaggtatgtatagcaatgacccaatacaatgcttaaatatattcatactttgtgagtgacccccaaaaaaggaagcgtttccgtacccctttaaaatataccatttccgtcataatctcctgtgatttccaattctgcttcatgtacagcttgatcatcttcaggattttcttcatctacatactttctacactttgcgtataaccaaatattcataggacggttatttacaacctcaagttcatcaaaatcaaagtctgcatgcctatctaaataatcttcaatgattttctgtaaatcttcttcgttaatctctatttttcgttctacaaatccttctttgctataatatttgaccggatatacatcacgcatcgtttatctcctcctatttatctttatacaaaggcggagcacaccttatgagtagtaaggatgtgctacattcagaaagtgtgcgatttaggtaattctacttggcttgttgaacaaataagaaccgcaaatccatcataacatacagtaggaaaacgaacattccccctttttttgaggggacttttgttaggccatcctaacaaaaataaagagatgaattatattaattatgatagtaaaatatgtacgctgaagttggggtccaaactcttacttttttgctcatttataacctgtatttaaggggttttaatttttaaaaatttgttaggacggactgacacttttaccctaacatttttttatagtaaaaaaatgtccaaaaacaaaataattacttctaataataaatagccccgtttttaacggagctacatccaaaagtcatcataatgtacatctttgttagttaatttcttcaatgcttttataatcttttgtgcatttttcatggttggcgaaaatttatctccttggcatacacgactaatagtcgatttacttaccccgcttctttccgctaattcctgttgagtaattttgtttttctccagaaaattggagagcttcgattttctccctttaccagaaataagccatcccattttatcactcctgttttaaattcttagtacaagagtggtcaaagatttcattttttaaacatctcaaaaataggaaatttaaacactatgaaaatcttcgcttcaacaaagatagtttcttccctggttcttcagcataaaaccgcatgtagtcacacatcagaatattgattaatttttcagctgtaaaaccgtgcatagggaaactatgagccatatccgaaaaaaacacttcaattcgtcttaatatccgtctatcaatttttacagaaattgtaccgtatcgatcgtcattttcattaaactccaaattaaaatccgtataatgtttcttgctctctaggatttgatacagctgctccatactatttttagagcgtatatgttcaagaaagtcctcaacaagtatctcagctagatcactagcattacactcgtaatcttcctcttccatatcttcgataataatattcattcgaaataagtaaattttgagcatcttcacttcaaaacggtacttctcttttaacttccattcaattttcgttcgctcccaccaattactagcactcataagctgtatttctttcgtcataacgtcgtatttactatacatgcgctcactccctacatggtgcgtaatgcaaagcataaaatacgtgttgcagctgctctttgcgaaactccccattcaatcgctaattggacaagcttagagtgcgctccttgctccaattttgcgtgaatgtactttttggtgtccttatattcatacgcatgtatttcactaatataatcaattccgagatgttctgtgatcaatttagacatgtattgtgtagtagttatattttgttggaacgctgaagatcttattaattgtctttgtatttcatttacggggatttttacatctttctttttgtcagaacgagttttacgaggttgttgatttgttattgtagtagattttctagaaaaactaaacatagggttaacattgctcatgatgctctcccctttcaaattcaacctcctcccccctctgtattctcagggacataattccaacatgctatcgttcctgctgtttttgagaggagggaggaaggagtaaaatttttcttacataaagcttttatctaaattagctagtaaatccatagcattatcaacgacttcttcagaaggcttttcatctactcctgcatcattctgtatgccatgagtatttatattgattagtaacttcttaactaattgaagtggatcttcttctcctgcaacttcagcaagtacctggtacatttctaatctctttttaatttgtttatttacataccctttttgtcctttaccttgttcctctaatcgagttacgaagttatacagaaccttgtcattgtttggatttagctcaatttgaagctttttcttttgtaagtttgtcaaagacatcacatcctaaatagtagtatcctaataggttagcttcttgaccgttttctagaaccgcaaatgttgggaattgctcttttttcttctcaatacgctttttatgaagagcagccattccaccagtccagacgattttatcgtatacagctaagttgaacttttgagaaacttcacgtaatgctgcatcaaaatgacgttgtaactcttcatcaaccttctcagctacgtctttatgagtgtataaatcgtatagagagccgttgtacttatagccattctcaagaatatagtgcatgttcgacacgcttaaatcaggtgtttcaccaatgttatcgcgaacgatttgttcaatagccataaatgctttctcacagcctaattcagttcctaaacgatcaataacagcattaccagacatatcagtaacatcaaatgtgccaaacccaccatcgataataagaatacgatcttctttattaataatttctttcttcactaagtaatactgagtgccgacgggttgcggaataactaagcattgtttcactttaattgtgattaactggccatttacttttactgctgtttcttccatagctactttttgaatcgattcacgttgattaccaaagtgtgatactggaagacctgtaacaagtaacggaattgtaacgttctttttaaagtcttttgcaatgaatccaaataattgcttcttaaatgttggatcctcatagcgcttcgctttattctcgccaagggcacggattaatggtagtttggattttctagcttcttctcctatgtagtatgggaagtcagtgtttgttagttcaattttcgtgaaactagcttcattgtagtagtcgtctacaggagccaacacagataattctgtaataacatctgcctctagtgatttatttttctttgaagcgcgttttgtaaagccatttcctaagtcaatcgcgtatggatttcctaataacatatacattcccctttcataaccattgattaatcattggtattttgattctaacagatatttacgctaggtttcaataaaatatgccaaaaacaacaaaatacaattgattaaccattggtttgtactttttgcgaggtcgttagtcttcgcaatggcttcgctaaatttataaaatgcgtgtagaaaggtagggaagccataagcttgtcctccctaatattccttaaaatcccctatatactgagttttagaagatataaaaatagtacggtgtgtgaaatttcacactctcattaattccctagatcctagatcaagcgaattaaatttatctaaggattctacagctccaacaaattctaaaatcttgggtatttcaaatttagattgaaaataaactgtctttgctcttggaaccttttgatcactttgcaattttttaaatccaacatttaattcattgttgaggacccgaccaatattgtttaatacatcaactgatccatgaattcgtaatcgtggacggactatcattctaccttttcttttttctcgaattgttcctaaatcgtgtaataatagaataaaagtctttacgaacactagttcattaaaatcgcctatcggaaaagaacgctcctctttagtaacttgggaccatcccatttcaactagcatgttcactaaagggtgatttaaacatactgctccttcccaataaggttcatcgcctccatattcgcaatatcttatagaccaacttctttcaaccaactctgaaaaacgagcaacaatccattttctttgacttcttattgagaaactgtcatttcgtttggaaccgtatctccatgcgatagctaatacttctgcaaattcatctgttgtaacaaagtgatcaaatcgtaattgttcttcttcagtaaatttgaactttctcggcatacgtattcatcccctatatgacattaatcttttttgtatttctttaatacgtcttctaaacgtttacgctcttcttcagaagcttgtccattgtcttccatagttgatgatccagtatcttcctcgccaacccattctggaaccatttctttacgtacagttttctttttaggagtatagctgcccttagttttattttgatttttcttattacgatgtttttcttcgtatttttgaatatcttctaatgtctcgcaattatcagcattccaattagcgatagttttctttatgtatgcaataggtttatctgcttctccatcaatagcacgtttaattgattcgaatactaatactgcattttcttcttcacacattttagttaattcaatttttgcgtacttagttgttttgaaatattgattataaaaattaataatgagattagggatactcttacctacatacttactaaagtaattaaaatcgttctgtatattaaatacttttgtatacgctaaagattctttagtcacgtgacttaaatttcttaagtcaccgttttcggatgaacccctattttcctggtgacttaagttttttaagtcaccaactggttgtggagttttttcttcctctttttttgctttctcagatgcttttttctcttttcgtttttttctttcttcctctttttttgcctttttcttttttcgtagatcctctatttcagctttatacatccaattatcagttgttaattctggttctaatacatacaaacgattggcgccatcttttacaggttcttcgtccaataagcccacatcatgaagctgctttttagctttgatagctattggctctgataccataagcatataacttagctcagtgttatcagcgatgcaataaatatatccttcgttatccacgtatgtatctttactttgtgaagtttgaacagatagtttgtaacgatcacgtaaaatagaatataagacacgagcattgttatctagctttctatattttggttcatagaataagtactgaaacaattgaaaatataaatctttacttgctttttcaccatcaatacgacggtcacgtttgctttttgacataataaaaaatcctccaatttccaccccgcccaaaaatgggtataggaaaatagaggattgtagttcacattttttaaagtatatgctatcatagacgtagcgatacaactttaaatatgttcatacaaacctcgatctccagtttccaattttcatcggtttagtaggcggacaaacttacatcaacctttgaaaatttcgtcggggtttttctatttgtttttttaatttatatgaaaaatttacatttgcaatttatatatctactctttttatgatagcagaactttgttgaaaaaagaagagtaaaagagaagaccgtcaaataaatgacggtcttctttgtggataagtaaggatatccacaagttgaatttattatttcacacctaaaggtattgatttgagtctttatatcgtaatgaagcatttataaattccctaaagaaaagacaccctaaggtgccttccttcgacttgataaccactttaattttaataacgagagagttaatagaatactacccaattcctattttaccatatttatctatattattcattgagaaataataaaagcactctttcgagtgctcattttatgcagatgcagaagccttatctttacggaagattcccattaatccaccgattaataataaaatacctggtaagatatagaatacgaagatacaaataaatcctccgattgctgcgattgtcatcatgataccgccagctttggctttatttctcacgactatagatccaacaattcctaaaatagatagacctaccgcagcccaacctaacccgataatagaatcagctccttcagcttcaaatgctgctcccattccacctatcattaaagctaaaacagcacctaatactccaaaaataccaccaataagtcctaatacaaattcagttgttcgtttcaaaataaacactcctatttaattattgtagattaattctcacttcttttttagataaaaaattgggtttgaagattaattggagcttcgggtcatctttctttgtttcgaaagcaatagttccagtgatttttccgtttggagctaatttaccagaattcaattgagtctcttcattaaccattgtaaacgcttggtctacaatgttaccttcgctattttgcaggttaaaatcgaatgggttgtaactgatttctttctttccgccattctctatggttaagttagcaattataaactcttgtccttctttaggtttgtcgaattcgccaccttgggatttttcaacattagaaactgttaatttatagtctcctagttgaatcgtttcaccaactttaaactctttgctatcttcttttttagtatctgtttgctcagttttttggtcgctagatactttttttgcagtttcctcagtttcgctacatgcagctaagcttaaagctaatgtgcctgttaaagctaaggtaccaagtttcttatacatgttattacctccagttatgtaaaatgtaagatttccgagcttatcatagcaaacatttaattataatattgtcatattttgtcgaacagaaatgaaaaaagcccctaacaaattgttaagggctgcggaatggtaccgcaatctagggagtcgccctagttgtggatgataaactgcaaacgttagcaatggcatgagctttcgtagcagttagtcaaagcggattatagcatttccttgagttggttgatacgagtaaaacatggtttacattacaattaatggatatgtaatattgcatatttccgaataaccgcataaaatcaatggaaatagtcaaaaattcactaatttctgactttacaagaatattttaccgctagtctatattaaaatccaaatgtactatatactcaaatgcaacaatccaaatagttacatttttgggttatatgtaaaaagagagcgtaatgttctctaaggtgtcaatgcttcggattttaaatataagagtttaaaaggctgtaaattttgtcgttacattatctctatggacttaatcatttctgaatttaaaattgcttacaagcgaaaatgaaaggtgtgatagctacatgaaatactttttaattaagtaagtatattcgactaaaagattgagcgctttctttttaggttctgtatctaaatcggatatttgatctaaaatgacttcgaactgtggaggcattcgatatgtcctgccaactaggttatcgaggctgacattgtatatatcactaagtttaatgagagttgatacatctggttcagaccgtcctgcttcccagtttgtatatgttgaacggacaacattcaaacggtaagcgacatcattttgtgttaatttgtttttcttgcgaaagtatactagtcgttcgctaagcaatgactattcaccgccctttataatcttcgacaattataagcgaacgagtggtaataatggtatatattcgaatggtatgattaattatgtgacctttatgttatgtgaagattcattatgagtctgtgtagaaataaaaggaacgagagttcgtatttgtggtaaaatattcatacaggttcaaaaaacgatgaaatgcataattgcattttttattccatgtaatacataaaacgttgatacaaagcggtttttcaattttctcaatagttttcagactattatacgacagaattttgggaaatttgtggtattatgataacaataaaaaacggaacgaaaaaaagactcacagcgtgtgtaagagtgatttggcccactcttacaccgttcgcccgactcacgaggggaacatctgccataagtctcttttcggtcactacacgagtaacatttacattataacatgccgatattactaaatcattactgtggtattatttttcctttaaaaaagttgagaaaacgagcgaagtctttgttccaatgggaggagcaaaagggatgcaagaaagtacaatagtaaaaacaaaagagcaaactatgaagaacttattaaaaaaaatcaatgatgatttattcgcatctaaaattactaactgtgagttagctttgtatttaggaatagctcaaagtaccttatcaagcatactaaatggaaaaacagaaattagttttatttatctagtaaagatcattatgaaactgtatgataaatcttttgtatcaatggaagaacagatgatatccgactatttagcatttgcaaaaccggaaaataaacgggaagcttttgaatatgctgcatttcaaagacaattcgattctttgaaagaacttatagagtcagaaaaaaattctccaacaatcgctaacaaagagtgcgcgaaggtttatgatattatatatacacattttaaagttaatgaaaaatatgaaccggcagatttttatgatgatcttgaatcgtgtaaaaatgaaattacaacaaatgagatgaaaatcctaactagtattttgatgtgccaagctttataccaaatgaaagaatataaaaggttattcaagcgtataactcctgtcgaaactaaagttaaaaaaatatttaacaattacaaacgtgatagttacttagcaagaattaaagagggtttaattgtaacttatatgatgcaaaataaagttgatttggcacgtgctatttgtaatgatctattagaaatttgcgacaaaaatcctgcctttataattcaaaaagccaattctttatataatatcggagagtcttttttatttgaaagttattcacgagcgaaatttcaccttgaacaatcacttttaattctggaaacaaatttctctgaaggtgataaagacatagaaagaaagaagaaaagaataaaaagcacaatcattttcttgaagattcatcattaccgagacttagatacattgcctgatattttggatgatgatgatcaagcttatttagaatttaagagaggtaactatcaagcgtcagagtctattttactgaaaatgaaagaaacaaaaggttatcttaatgagtttcagacactcttcttaggtttagcaagaaatgaccgagaattaatcgaaatctcacatagaatgtttatcgaaaaaaagagccttttttacgcaaatctccctaaaatatacttgggttaatattcaaaaaatggtataataatcttatgtgaaagaggtgaattgattgaagaaatacttaatgattctcccaatattagcttttgtgggtatgattacttttaatattaattacaagatagatcaaaaagaatatacaatgtctgagcctaaagttgctatgatgtccgaaccaggtggcggaggctggtaaaatttaatataaaatgtagagttgcgattatccaaaaggggtaatcgcatttcttgattttagagggcgttcgaagtttattgtgaaaagctaacttcgaaagtatgtgaatgattcacaaactataaagattacattggaggatttagggatggagaaattagagaataaaactgtagtagataaattcggggacgtactaaaagaagtaatgaacagtgctgagaaaggggattcagtatcttttgatatactagcagaaataaaaaaagcggttggtagcaactaaagctatcaatcgccggatatcttaactaagttagtaataagatctaaaagttctttttgcttctcaggtgattttgttttaacttgcatcataagtctttcccattcgtcttttgcagcgacgtcagggttcttctcatctgattcgcctagtacataagaaacagatacattagcaagttttgcaatttctaagctcatctttttagatgggcattttgtactctcttcattttcccacatcgaaacagctgatctactctgtatccctaaagcttcagcaaattccctttgactaattcgcagtatgtcagttcttatatctttcacacgtctactaattaatttgtaatccatactttatattccccttaatatttattagtaatttttatttactaacactaaaaataattatataaatacatttcctatatcttaaatttaacaaatatgttctcgaaatgacaacacttttaaaaacttttattttttataattttggggttctcaaaaagagacctcttgtgatatactcaatttaacgaaacgaacaaagggtgataccgaatgaaattaaacactgaaaagatcagagaacttagactttctaaaggtttcacacagattgaagtagctgaaacaataggttacacaaataggaattcatattctcaagtagaaacaggaaaacgtgaacctaacttacatagattgtctttgttagctaatctgtatgaagtaaccatcgatgaattgatgaagtagtatatttttttgcctttcaggtctctaaatgagacgtctcaaaaaacgaatgatgaggagagtaaaatggatcaattagcagcagtaaatgaaacgccagtacatgctgagttagtatttgaagttaatggaaaggcagtaacaaatagtttaacgattgctgaggtgttttgtaaaaatcacgctgacgtactaagagatattagaaaacaaatggaatatgcaggttacgaattttcactaagcaattttgcggagcgaacttatgagagcagaggacgttattatccgaaaattgatatgacagaagaagcctttacattagttgttatgagttacaacacaagagaagctgttcaaatgaagattaagtttattcaagagtttaaaaggatgcaagaatatattcgcagcaaacctaaagcgatgaacgcaaaagaaagtatcctggccaatatgaaaatgactattgagttaaatggagaagtcgatagtctgaaaaaagatgtagagaaaatgagaagtgatatagataaacgtatcacgcttgattatggacagcagcaagtaattagaaacgctgtaaataaacgagtacataatctatggaatgaaaacaagatagataaggaattgtacgctacaacaagaaaagtgtactccgctttatggaagaacctaaaagatgcttaccaagtgaatgcttatcctaatatacttcaaaaggattttggggaagctctcagttttatagaaggatggcgcccgttatttaacggtagtaaaaccgcttaggaggtagaaagatgattgacttaaatagttttgcagatggggccttatttgaaagagtaaatattgaattaaagaaggttttggagaacattgcagacccaaataccgaccctaaaaaggtaaggaaaattaatattacgattgcagtagcaggtgatcagcaacgagatgtactgaattgtaaggtacaagctaaaacaacgttagttcctgcaacagaagttgaatctaaaattgttatggattatgacaatgaaggtaatttagtaggacaagaacttgtttctggagtaattggacaaaccttttatgatccaggtgaagaagtaataaaaaatgatgtaggcgataaagttgtagatttacgtcaacaatcaactaactaaaaaaagaaaaggggaaatgaaaaatgattaaagcagcaattgaatatgtagttggattgggaaatacacgtattgaggagattaatggacaaaagttatcaacacaacctatgcatgttattaagaaaccgacagcaaaaacaatcactgtaaataatctttctggtttagttgcctatattaaatcgcagtttgatggagatcatccattaatggttcatattgaaagtccaacaagtgtttcttgcttcacgcaaattaacaatgactataatcgtagtaattttattcaagtagaagcattattaccgcgtttttcatttgaaagataccatgatgtagagaattttaatattagtttacagtctgcatttgtaccgaattcagatcgtgatttaatgctcaagcttgttggaaatgtcaaggaagaggctgtaaatacaattggtgacgatggtgtttctcaaagtgtcgtagcaaaaatgggcgttgctactgtagggaatgtgaaagtacctaatccggttttattaaagccatacagaacatttgttgaagttgaacaaccagaaagtaattttatattccgaatgcgtaaaggtccagaatgtgcattatttgaagcggacggtggcgcatggaaactagaagcaattgacaacattaaagagtatttaactgctgaattagcagaggaaattgaatctaaaaaggtatttattattgcgtaatggacattgtcttagttgagagtaccaatgccgtgtgtatctttggtttaggacttggattactagcattagcagcatacaaaggcggtagcttcatcgagcgaaaactcgatgaagatgaccgtaaacaagaacgggaagtgaatgtaattgggaataagagacagagtgcttcctgagcatgtacaaagagctgaacttttagagggaaagcttcgagaatatatgatgaatcgtaagttattactttctcaatgtgaaagagcaatgaattctggtgagtttacagctgctcaagaattaaaaacactatgcgacaaacaatctagtgaagcagttgcgattgaatcggaacttatggacctgtacatgcaaaagcagaagagtgatcaacaaaatagaaataaagaaagaaatgaagttttgaaagttgctaagcatctagaagaagttagtggaagttcgaagatagtagaagaaatcaaaaaaagtgtataaaaaatacccatttgcgagatgggtagttaagaaagaatttacatttgcaattataacacattagtacacataaacgcactagcggccatgcaataagtgcattaaatataaacgataaaaaattaaaggttgggagttgaaatttatgttcagtgcgttgtttgacaatagtgaatggtgcgatatttgcggtgatgtaataccagaatccgatgtaacaaatatgcacattgagggatgcgaaaaaacgttatgcaaatcttgccgtggtgagatggaaaccaaattaaaagtgatagatgtcaatgttttagtagacatgttaaaagcgttaattaccaaatatggacgcgataaggttcgtcagtttgatctaattaaggcagaacaatatgtgaaagaaaataacattactttaaacatagaaaagcgtggtgggcaatttaaccaagaaaaatcaggtgaatttgtctcactctctacaaaagaaatactaacgattataacacttttacaaaggaagatcggaactcatttatggatgaatgcagttatcggatcaatattagaacgcggattcactgcaacactgcaaatgcagttagaaggtgagcaccatgacggaacaactgacactgttactgaatgattctataaaacaaccagatatagtacaaagtgctccttttgatataaagaaggcgcatgtaaaacaaaggcgaggattggcgagctttgtagatgtcatggctattattccatgcgacgtctggagcgcggacgaactgcctcgctctacaaaacaggataatcactttgacatgttcatggattatgtcaaagctatatggcgttataagagaagtgaagacaaaagttttcattgggattccgcagagaggatttgctgcgcggctagggaatcgcaagagccacagcagctaagaatctatttagatagtggatttagaccgcaatatgtaactaaatatcttaaataacgaaaggatgttaattactatggaagctgattttattggtgcgttagatgcaatgagagctattaagaatggattgaaaacaatgcaagattgggatgatatatacctcgtaattaatgaagaagatagtatttatgcaatttgtgatgatccagctaagtttgtcgaaggtcgttgggacagttggggagcaggacatgatccggttgtatatgcaaatgaatttaaaatatatcaatatcaacatgctaacagagcatctgatgttagtaaaaacgggttctataaaccagtcaagtttaaaaatggaaaaacgacttatgcaagaaaagaaattcaaatgaacggagcatacatcgttaatttttgggtttagtacaaattaaggaggaattaaatatgaaagtgactttagtgaatataaatatgacggaaatcattgcaccgtttattgcaaaaggggaatgggtagcgtttgaaggcaaagactacacaatgtttgcagcagtagaagatattgcttttatcgatcagaatggcggtattgcattatatggaacgtggggtaacgaatcggttatgagtgtaggagataagggatggcagtttgctgatcagtgccgaaaagcaacagaagatgagcagtattgggaagaacgccgcagagtattcgctgctaaaggtagaaaaaacaacgaattccatcctggcgacttcgttagtaacgataaacgtgttttaactgtacaacatcaagattctgaaacgggacttgtagcagtactggtcaataattcagatgaaaggttccaaatagatcctaaagaactagaaatctactttttcgcagaagatatggcaggttaatccgttatggataaggatacattaattgtttttgtaatattcagtcttattatagctatagcaattagggtattcgataagattcaaaagtaaacagcaggtgaacaaagcaattggagaaacaaaggataataaatcgattaatagatttgaagtgttataggctcagagaccgtcaattgtgggaattggacgagctagaattgacggtcttactaatagttacaaatataaaacaattaaaggggataaataatatgaaatttgaaattacttgcttatgtggaatgaatatactggctagtttggttgaaaaggaatttgaaaatgaaggtccagttacatctgtattgccaattattacaacggaggataacgggattggcggaatcatggtaagcgcagaagaaaaaactattcatgtgaaatgcacgaattgcaacaaaacggcgcgctttttgctagaagtacctttggagatgattaatcaagaaaaaatagcagaaatggattggtcaaaagtctcctttgttggacaggagggaaactaatggatactcctacatacaagtatcatatttcaacggtttttccgcagtggagatgtgaccatattgtgtttaaggaaagtgaagagaaagcaaaataccactattataaacaatttaaaaagcagcactttatagatatgccattcgaacaatttgaaaggttcattagttgcaagtatctgggagtagtagatattagtacactttttggacaagaagcaccatttcgaaaaatgtgtaactacagaagaataccatttgctaaacgcgggatgcgtgtcgaagtacagggaagacaagggacgattgtcgggaattgcaaaaatgatttgtacgttattttagatggaaatccgcataagtttagatttaatccgtattgggaaattgcatattttaatgagaatggtgccattattaaagattatcgtaaaggagtgtatgcacaatgagacatacaactaacttgcatatcattactaaagaagaaacaagccaaacatttgatattagtgaattaatggaaatgcaaaaagaacttgatagacgcattggttataagggtaatgacaaattagacatgctgtttcgtgcattattagtggagattggcgaggcttggaatgaaacgagagcatttaaaatgtggagtgtagggtttgggactcctaaagaagggctgttggttgaattagttgatgggtttcattttctcatgaacattgtaattgaattagatcgccatacattaaagcgtagaatagcagcaatgttccgcgaacaatacattatgaagaaaaatatattaagcgtcaatatgctatttgaatggtatatgcaggatattttaaccgctaaacgtgcgtggtgccaatatagagatttaaacgtaactctaacacatttgcataaggcttttggtattttcttccgtctttgttacttgtatgggtacaaatttgaagatattgtacaagcctacaaagataaaaataaggagaactttgaacgtcaagcaagtggatattgagtaaagaggaggatgggttttatgaaatcgtcatatgaatattatgtcactccagaagattatgaagtagcagctaagcatggggttagtcgtaaattattagaacataggattagaaatttgggttgggataaagattttgcaatgactgaatcacctcgaaaagcttcagaatggtctaaagtgaaagagattgctttgaaaaataatataggaagaaccacatttaagggaagaagaaaaagaggttggagtttaatagattcaataactaaacctccattgagtcgagaggaaactttgaagcgtgcgaatgaatgtaatcgtgtattgacggatgaacaaatacaaaaggcaaaggaaaatggcttaagatatagcacagtttacgatcggattaagaaattgaaatggaatatagaagaagcgttaacaacacctgctttatcaacaaaagaacgtatgcggagactaaaagaaaattcttgttggattagattgtaaattatatataaatatttgttattaagtaggtggtgtagtgggatatacgttcatatttttattaggctggattataggcttaataacaggattattagaaaaaataaatagaaaaattaaaggggaataaaaaatgaatacaattattattaaatttggacaaggtacagcagcttggaaggatatgcaagatattgcgaaagtgttacaagagaaagggtattctgttgaaccgtatgaagaaattggaactgtaaaactaactaagaaaatcaatgacgaattagtagataagaaaaagcaatttaattgtgatatttgctttttaaataaggatattgaagaaaagtctatttatcaattcgataagtctggtgacattgtagcgtgtatagattgtgagaaacaagcatttgaacagtcaaaaaaatagctattttggaggggaatgaaagtggagaaatgcaattatgttggatgtaaaaatgatgcaacaaccaagggttttatattcgctagagatccacaaggcaggaagcatcttcctacagatgtatacgcttgcgataaacataaaaagtcttccagtttttttgaatataaaacagcaagaacaaactaaacaaaatttgaattttgtacaaaaacggaggggaatagaatggtgagaagtttagattggggcggattgaaaagtaattgggaagcttttaaagagttcgttcaaagagaaggaaaaggcactagcatattaacggagtactattttgtattcagagaagacgactgcggtgatgaagcgtacatttttacaacgcattctgacttagatgattggctatcggaaatgttttggcaatgggagcgttatgatactagaaatgttgaagaatcgatggatgatgtgtttgtttggaagttaatttctgaaagtgattttaagcgtttagacacgctatataagggagcaagaaaaacatcgattgaaatcaatggagaaagatactatagaaagttaataaaagtatctgtagagccgacagttgttgtttcaactaatttttattaaaagcgttatttgagagaaaaggagatgaatacattggcccaacactgtttaaattgtgggaataagttagagacggttaattatgttgaaacttgcactaaatatatttgttctacgtgtaatgtacactggtttcaatctagaagagtagttgtagagtggactaaacaaaagattaaagcagacaatacaaaatagttatttgaattagttttattaataaaaagagcacacttgtatatgtgctctcaataaggtagatgaatgtctcatgaaacagaaaaatcccaaaagttgtaatcagattttcatgagtaaatttttaatattgtattccttatgtgaatttatggagcctgtcattaaagaaacgatacgagttggagttttaacccaaacgatatttcataataagcgaaaaggagcacacatataagcatgctctttaataagaaaggtagatctctatgagcgcagagactacatacaatatccatatgtttgtttcttttaaatgtgaagaaaaaatcaacaaaaggtcaatgtaaactcaataaaaattcaacaaaaacgctattttattagaaaaggaggaattatattgccagttgctaatcaaatcttattttcaatagtgttgttgctcctatatgtagggagtgtaattgtaagtcgtaaacttatgaaacgagtgatggaagaggaagaaatttacccaaatatttttattatatgtttagtgttagtacctataggaaatattgcggttagtatcctttgttatcttactttttgcacaaaaaacttaaatacagacaaaatagctaaaaaattctttggaatgtaaagataaaacttaacaaaaacttcattttatcagaaaggtaggataatcaatggcaaaaccaattagaacaaagaagcaactaaacgaacgattagattatatccgtagcatagcagaagctgaatggtgcaatagcgaaaaagcacatgtagaacaagataaattgttacgtgatgttcttgtaggaataacaagtggagctgaaaatcctgtttatttggcgggtagggccttggaagtattcaatattgagtttagtagatggtattcgtaatttgaacaaaaatttcattttgtagaaaaggggaatgttaaatgtactttatggaaaaagaagaggatttagttgggaaagaaatagcttttacacacatggcacaatttgctaaggctattacgatcgttacaaaagataagggaatattagtagttgaacaattccaagatgatggtagcagtgaaatcagtatgtacggtaaatacaacgcaagagcatatgtgttaaagcataattggttaagaaaaacattgcatgaaaaagggataatctctcacgaagaaattgaagaatacgagaatgaaatacgcttagcgcatcaaaaacaacaagaagaatataagaaaagacaagaagaacaagaaagacgagattatgaacgtttaaaagcgaaattcgaagatacaaataactaaaagagcagctagcaaaagctaactgcccggctggttctccaagggggaactgggagaaagtaacttaatgggttgtctacagtattgacggaatattgagttttattcagggggggaagagaaaatgacagaaaaagcggagcctaaaatggttcctatggcatcttacggatggaacagagaaaaacaatgtgtagaattccaactgttaataaacgaagagatatatgtaatgccaatttatgagaaagacgtaagaggcatggagacttggtttcagttaaaaaaacataacttaataaaataatccttttaatagaaagtgagactgatataaatggcatatagcggagcacatggacctgcatttgaaaatctaattaattggtcaaacgatatgtatagaaataatgaaattgcattaattgaaaaacgagctacacccgttgtagttacgaaaaaatatagggatggaagaattaaagaaggatattacgagaaaaaatctacagtggattatgatgggatatataaaggtcgatttattgcatttgaggccaaggctactataaaagaaaaacgctttgatttaagtaatataaagcctcaccaatacaaatggttactacaagctgagcagatgggagcaatttgtttcattttattggagtttagtaaagaacattctatattcttagttccatttgcgctaattaaagagtatatgaaagcagcagaaaatggtggtccaaaatcaataaaaagagaagtatttgatgagagagcatatttagtaacaccaactaatcgtgcgttagtagattacctatattatgttgataagttagaatggccaagtattagttaaagtaatagagggtgaagatatgaatgctaaagaggcgcgtatcaaagttctaaatatgcaggataagtattgtaaaaattgtgagtatagatatcagcaattggatcattgtagttcaaattgcaccatagggaaagaaataataaaactaggcgcatttctaggtggcaaagaagaagtgcaaaagcgaaaaaggaaaacgaaagaagaatgggatagaatttgtgtgaaagctgcagctatgagagaagacggaatgacgtatacagctattgctagatactttggtattgcagatggtaaaaatgtatcggagcagctaaaaaaaagaggattaaattaaaatttcacttaccgtattaaaatgataaataaaaaaacaatgaaagtaatagtccgcattcagagggcgtttgtgtgtaggaaagcaatttttcctgtatacaattcagcgtcctctttttatataaaaggaggaacctggctgatgaaaaaattaatgcagcagtatatagaaacaagaaaagaattagaaaattctaaggtaggcgcaacagaaaaggatataagtattatcaatggaatgatcagtgatattaattacgctctagaatggatgcgtactgctaaacagccagggaaaaaaagaggaattgaacgtagggcggcatatgaacgtgagaaaccatgtgacccattattaatgcaaagatatgtgcgtagtactgtaatgccagtatatgaatgggatacagcagcaaaagaaagtgttatctctgaatgggaccgtatgcagttagaagatgcattatcaactttaacggatagagaaaaggaaatatatgtaatgtctagaggtcatggtttaacgatggaaaaaatatctaattatttaggggtgaaaaaaactactattcaaaaccatttagaaagagcagataagaagattggaaaaagaataaatgaaagtctcttctgcatgttttgattttagttgcgaaaaatgtcgaaatttgtggtacaaatgccccctatatatgaaaggttaccgagacctgttccgatggtatctgttttgggtgaccaagtgtttgctcgtatatagattctatagggatgtttttttcaatacacaataagcgatgggatattgcgagtctcattgctgcaaatcatttaataaaggggttgattctcatgtagtaaaaattaaaacaagtacaccacctatttaaaaagacgtcggaagaaatacaaacgtcttgatatgaatcctttataattcgatatcggtcaacgaaggctatgcgacagccgaagtattgactatacctattcagagggaggactattcttagtcttctctcagtcactgaacgtaaagtgcgtagctaagaatacgggaatgcagtggctgagagaatgttaagagtgatcttggcattcgattcacatagacatatccccttatgttcgaacgtgaatttctcccatcccctttaatatttttataagccgtaaaagaaccgtcattttaatagtggcggtttcttttttaaagaaaggatgaggatatgagtaataaagaaaatgtagaaataacaattatagcgaacaacgaattgttagagaaacaattaagaaatagcactttaagtgatggagcagctgttaaggaattaagaacagtcaccataccattaagcaacaataaaatcattagtattccttatttaaagagtgaactatagcatccataatgggtgcttttctttgttatataaaaattacacattaaagatcgtttaactatgttagatggataacgaatgtatacagctatagtagacaaattagacacttaaaaaggaggatgaaggatggataatcaatatcttgcggaaagaatcgatcgattagaaaaattagttaatgatttagatagtgtaaatcgagatcaacaaaaagtaattaacgacttatgtatgagaattgaaggtgtagtcaacacgattgatcatttaaaaaaggaattaagcactaaaatgagcgttcttcctaaagatgcgcaagaaaagatagagaagttaaagaaagctgcggagggaattgtagatggctaataacaaattaaagattaacattgatgtcgatacgacagaagcgttaaaacaaatgaaggaagtaactgaagctgccaatgaatgtgttgctgcattagagagattggagaaattgactaataaattttcaggtttagcgcggggaggaatagtgagtgctggaatgatgagtgttcctgtcaccttaaatggggggacgattgccgaatccgtttctaaaattcaagaaaatgagagtattagagtgcgacagttttaattaaaccaatagcaattatcgtaggcgcttccgtgatctgggggcgtcttgtttgttgttaaggaaagataagcgcaaacgtgttgcattttagaaaacaaatggacacaatgaacggaaatagaggaggaaataataatgaatttcggtcaagctctagaagcgttgaaacaaggtaaaaaagtaaaaaggtctatttggggtggatattggtttctctccaagaatccagaggtaaaagaagaactgaacgctggatatgtaagggaatttcaaactcacgatatgatattcgctgtattaaaggataatggtggggttgtacccgctcaagcgtaccaagctgatatgttagcagaagattgggaggttgttgaataatgagttttggacaagcgatagtggcactagtgcaagggaaaaacgtagctcgtgaaggatggaacggtaaaaatatgtttttgtatcttattgaaggtaataaattgtctaagggattaggatatggatacggcgagtatgtaggggtagaaccttcatttgttgataccattgcaatgaagactgcacaaaatacaattgttgttggctggctcgcatcccaaacggatatgttagcaaatgactgggtaattttaaattaaaatacagatagttaacatagtgaagtttatgcaagaaattagggttaacgattaataagaatgctgttaaatcaacgatgtataaaaactgtataacggtataaaacaagaatcgctcaaccatgcgtatttcccatgttaatgactgtcatataataactattatgtaaactaaaactgttaggtctattcatttccctgcataaattagttttcgttatggatttttcaaaataagattctttttggagtggtttttatgaaaaagaagcgatatatgaagaaaagaaagaaaatgaatctttattatgtgacgaatggatatacaggatatagccaaatacatgtgtatgtcattgcggaaaaccacgagagagcagaagagctagcttccagaagatttagagaagacgctagaaataaagattatgatgaagttcttgctaggcataaaaaaataggatggcctacagatcacttacaagaatatcgttatgatgaaaattattggaccgacctagatgtctattgtgaagcagaagatgtatcgcaagaatttgtttctgatgtaaacgattaaatactgctttttattttggagggagtgatggtaatggaacaggatattaatgaaataagttttaagtatcttagtcctatatgcgaaacattcaaacttgattttgatgaaatctccgatgatgtcaaaagacatgtgaatgctaacaattctaaaatcaatgcttctaatgctgttctaggtatgcgttttatcttatcgagaatatggtgtacagatatgcataaggaattaggtgcgattgattggaagacagtaaaagaaaatatttataaggtttctagatcattagttagtaaaccggaagaacaatatcaattcattagaaaagtcgctggtgcacaaggttactttatgctgtggctattattagaagaaatgcacgagaaagaaatgttagcgctggaataagtgctattttttattttggaggaggatgaaggatggataatcaaaactaccaaatgaaaactgaaattgttgaattaagaatacaagttactggattacaacgaacgattgaaggattaacaagaaaagtaactatgttcgaagaggaattagcaacgaaagcggatataactcatgttcaattaataaataaacaatctgaaataattaagaagagtaacgatagtaaatctattcctatggattgtaaagttggagtttcattagatggaagagttgtagcggaatctattgtcgaacatacagctgattcaatcaaatgtggcgtaattaaagggagtgagataaatgaaactagataaacaagaacaagctgttgtaattggtacatttatttcaatgttaggacaggacgttgtaaatgaacgcatcgataaaaagaaattagaaagtgtacttcctatctttaatgaaatgcaagataatacaacaccaaagcaaaagagagaagcgatgattagtttgcttggtaaaacgttggatgaattcttagaaaagtagccataaaaaaaggaaaagtaactcgtattggggacgaattacttttccagatgacaatgttaactctattatagcaacttggacatatttataaaagagtaatttgaatctttcgtaaaataaattagggattaccgcgaggtggtggttatggctagacaacgtagcccagatagagataaagcattcgaaatatataaagcaagtaaaggtgagaagccattagttgatattgcagcagagttaaatctcaaaccttcgcaaatcagaaagtggaaatcacaagataaatgggatgagcaaatgaatggtaacgttactattgcaaaaaggagcgttaccaatgttaaaaatcccaaaacgaaagaaaaattaaaagagattttagaggatgaagagctgaccgaaaaggaacggctcttttgtttgtattatgtgaaatacttcaatggtacacaagctgcgttaaaggctggttactccaaagatggtgctcatgtacaagctagccgattattaagacgtgaacgcgttgcctcttatataaaagaacttaaaggtgagttagtcgagaatgtatttgtagaagcgatggatgtactaaaagagtacattaagattgcttttgctgacattactaactatgtgacctttgggcagaaggaagttcctgtaatggggatgttcggccctatgaaggatgaagcgggtaatgaaataactcgtattatcaattatgtagacttgcatgaggctgatatggttgatggttctataataaccgaagtaaagcttggaaaagatggtgtgtcagtaaaacttgctgacaagatgaaagcactggacaaactatcacagtactttgatttggtacctgacaatttcaaacggaaaatcgaagaagaacgccacaaaatacagatggaagtgcaaaaagctcaaattgataaaattaaagcagatacttctcgcattaaaggtgatgaaggtgaagagtatgaagatgatggatttatcgatgcattagaaggtaaaacagcagaggtgtgggaagatgaaacttaaacctgctccttttaaattcagaccattctctaagaaacaattacaagtacttacttggtggagaaaagattcacctgtgaaggagcatgacggcattatatgcgatggttctattcgtgctggcaaaactgtatcgatggctctttcttatgttatgtggggaacagaaacatttaatggagagaatttaggtatggcaggtaaaacaattggatccctgcgacgtaacgtaattactccattaaagaaaatgttgaaatcgcgtaaatataaagtgaaggaccatctatcagataatatgcttactattagcaaagatggccacacaaatcatttctatatattcggtggtaaggacgaatcatcacaagaacttatccaaggtattacattagctggtatgttttttgatgaagttgctcttatgccacagagctttgtaaaccaggcaacaggacgatgttctatcgaaggctcaaagtattggtttaactgtaaccctgccggtccgtatcattggttcaaactcgaatggatagataataaggaagacaagaacctgctacatattcattttacaatggacgataatctttctttatctgaaaaagtgaagcaaagatactatcgcatgtatagcggagttttcttccaacgattcattttaggactgtgggtgcttgcagaaggcattgtatatgacatgtttaataaagaaaaacatgttgtaaaaacaaaagaaagagaatacgagaagtattatgtatcttgtgactatggtacacaaaaccctatgacatatggattatggggcttatgtgatggtatatggtacaaaacaaaagaatatcattatgacggtcgtaagaactcgcaacaaaaaactgatgatgagtatctggatgatctaaaagaatttgtcggagaaatttctattcgtgggattatagttgacccttcagcggcttcatttatcgctttattaaagaagaatcgtttcaaagttattaaagctaagaatgaagttatagatggtatacgtaatgtagcgagactactgaatgaagagaaaataaaatacaacgactgctgtaaagaaacatttcgtgaatacgcttcttatacttgggatgaaaaagctacagctcgtggtgaagataaaccgaataaagaaaatgaccaccagatggatggtgatcgttattttgtaaatacagtcgtggtaactaataacaaagcgaaagctgttaagtcaatctattaaggaggtgagacgatgtttgaacactacattccgttactggatgaagaaaatggtgaacccacacctaagctactcaaaaagattattgatgagtttgaaccactaaaacaacgcatgataaataggtatgagcgttacaaagcaagtgagaaaggcgtacctatattcacacgtgagtttaaaggtgatgggaataaggacaaggttaacaacaagctaaacaatgatttcttttctgaaattattgatacaaaaataggatatatgttcggattgcctatttcatacagtctagatcatgaagacgaggaagtattgaagcgtatccaagactttttaaaatcgaatcataccgaagatgctgacgcggaaacaggaaagtttgcttctatttgcggttatggagcgagactgctttaccatgacaaagaaggaattgaaaaggttatgaatatcaaaccttatgaagcaatatttcttactaattcaagcattgcagagcctaaatacgctatccgctgctatccaatcaaagtaatcgatggtgatgatttcaaagacggatacaaagtggaattttacaatgatacgcaaatcattgagtacactggtgaagatttagataagttgaaagaaacaaatcgaattactaatttatacaaaggtgtaccacttatcggatttcctaacaatgaagaattgcagggggatgtcgataaagctatttctcttattgagggatatgatagggctatctctgatgtaaatagtgagattgagcagttccgtttggcttatatgattttcaaaggtgtggatatagatgatgataccattgagaaattaaaacaaactggagctctggatgtaggcgagaatggcgaggctaattttttaactaaggaccttaatgacaacattttagaacatcatctagacaggttagaaaagaatatatgccgattcacgaagcatgtgaacctttctgatgaatcgtttggtggtaaccttactggtgttgctattcgttataagttgctatcgttagaaacaaaatccggtacattagaaatgaaattcactaagtcattgcgacaacaatttaagttactattcgacgcttggaatttacgctcaaataaagaagaattagattacctttgcatgacgttccaatttacacgtaaccttccagcaaacttatctgatgaagctgatgttcagtctaaattacagggtttaataagcgaagaaacacgattatctatgttatctgttattcctgatccaaaggcagaattacaaaagatgaaggaagaagaggttgattctatcgatttagacactgtacataaaggcggtgaaaacgatggaatgggacaagaagcagaaacacctccaaaagatagaggacgagctggaaaaggcgattctctacctgtataaagatgctttggaagaagtcagaggaatactggctttttattatgctaaatatgcgataaatgagcagttaagtatgcaggaaatgcgtcgatttaatcgatacaagaacctgcaaagtgaactacagcaagttattaatgaaataacttatgagaaaaagaaaactctcaatgaaacactctccactcaatatggggagtctttttattatacgagttatcttatcgaaaaagaggttggtgtatccctttcatatgggctgattgacccgaacgtcattaagcgagcggtacaaatgcctatcgataaaatgacactcaatcaaaggttaagtactcatcgagcacagataattagccgaatacgtaaagaactatccatcggccttagaaaaggtgaagggtatgcggtaatggctaatcgtattaagcctattcttgatggggatgcgaagaaagcacaaatggttgcatggacagaaagtgctagagtacaaaacttaggtacttatgacagtgcctcgcaagcttttgacgaaggtgtatcaatggagaagatttggatttctacattagataaacgtacacgtcctactcaccaagcagcagaccatcaaaaagtaccgtttaaaggattatttaaagttggtggttatagttgtgaatatccacacgatagtaatttacctgctaaagaggttgtacgctgccgctgtactttcattacggaagtagcggatgttagtccatttattgagagaagggctagaaacccgacaacaggtaggaatgaagttattacagcagttagttatgaagaatggaaggacggtctagaataatgaattttggaaaagcactcgaattaatgaaaagtggcaataagttgtcacgtaaaggttggaacggtaagaatatgtttgctgtttatcaaaaaggatatcctgatggaattccttgtaataaacaaacggcagaagcttggggattaaatgaaggtgatttatttaaggtacgaccttacttgcaattacgttgtgctgatggcactcatgcgatgtgggttccaagtgtatctgatattttagctgaagattggatgattgttgaataatacaaataaaaacacttgagggcttatagattatgaacttaatagggcgtattcataggaactcaaaggaggaaaaatgatgaatattttacaaaaacataagcagttacagttttttaaagaaaaggaagtaacgaaattaccattacgtttatcaaatctgcaattcttttctgatccaacaccacctgcagatgatacgccaccagatgaccaaacaccacctgttgatgacacaaaagaaccacagttagatgaagcgacaaaagcgtttatcgagaaaatggttcaatcagcagaagacaaagtgcgtaccaagtatacgaaagaattgaacgctactaaaaaagagttagaaagcttccgtactgcttctatgaccgctcaagaaaaagcggaatacgaaatgaaacaactccaagagcaaaatgatgaacgagaaaaggtattacaccaaaaagaaatgcagtgggctgcaactgaggcgttatcagaagtaggattagacctcaaatttgtggactttgttatcggtgctgatgcagatgacacaaaaagtcgtgtggcgaagcttaatgagttattcaatacttcattagaagctaaagtagcagagaagtttaaagcagcagggcgcgaagtctatgccggttctggtagtggcgctgtgtttactcgtcaacaagtagcaacaatgaaccagtctgaaattaacgaaaactgggatcaaatccaaaaagatatgaaaacatggaaataatgaggaggaattaatatatgtcagtagcaacttttattccaacaatttgggaagcgcgtttaatggcgaacttccacaagcgttctatcgctgatttaatcacaacaaaaccaacaaaaatcgaaggtaacaaaattatcttcaaccgcgtcggggcagtaaatgtaaaagattatgaaggaaaagtagaatgggatgacacgaatccttctaaagtagaacttaatatggatcagaaaaagtactttgcgttcaaagtagatgatgtagatgcagtacaagcagcaggtaatttaatcgatccgcatacacaagaagctggcgcggtacttcaggaaacagttgatacctttattttaggtaagtatgcagaagctcttaaggaacacttaatcggtagcgataaatctccaattgaattaacaccaaaaaacgcttacgactatatcgttgacttaaatacaattttaaacattaaaaaagtacctaaaactgaacgcttcacaattattaactctcaagttcttggattgttatctaaggatgaccgttttactaaacaacctgtcgtgttagaaaatggtattgttgaaggtcaaattatcaacggttcacaaatcgttgtgtctgaagaagttcatggatctggtggtaaatataaaattcttggacttcataaatccgctattgggtatggtaaacaattagatgaaacagaagcaatgcgtctacaaggtgcatttgctgatggtattcgtggccttatggtttatggtggagatattcttcgtcaagaatcactagcagtgcttacggctacaatcgtaccaactacaccaactgcaccaccagcaggatgaggggcttaataagcctttcatctttttcatttacacaagtaggtgattagatggatatgaaaatagaaattttaaagcgtgtacaaataaagctgcctaatgaaaaacctgaaaatctattagtggatattgaagatacaatgcttgtggttgctgagtatacgaatagaaaaatacctgagtttcctcctgcttatcctggtattatttccaaaatggtgattcatcagtataaggaacaggagagagaagggaagaaaagtgaatcattaggtaactactctgttacttatgatgatattggagattatcctgctagtattacgaaagggctgaaagtgaggctacgtgtcttatgattcaatcgatgattcgtaagtttggtaaagatgcttcagtacttcgtaatgatggttctgatgatggaccatatcctacagaagaatggagagtaataaacactgtaaaaggtgtactagatgccattcaagggacaaaggatgcacgtaataagaaagtagaagaggaaagtacacatttcttttactgttttccatttgacgtaactattcaagatagattagttattgataataaagtatacagcgttacttatcccggtgatccaatgaatgcaggtagattttttcaaatagaattggagatgttgccatatgagcatgaaattccaatcaaatagagctgctgttatggcaaggcatttagctgcaaagaaagcggctcatactgctgttggtcaatttgttagttctaaagccaaactattagctgctgtagatactggaaatttaagaagcagtattagttctaaagcggaactagaaaaggttgttattggtacatccgctgactatggcatatacgtcgagaagggcacaggagtctatgcggttgatggtgacgggaggaaaactccatggatgtaccgtgacccaaaaacggggaaaatggttaaaacgcaagggcaacatgctcaaccattccttagacctgcagcggagaataataaaccgatgattacgcaagctgcaacacgaacctattcgtcattaatgaggtagataccatgaatgactttataaatacattacacagtgaattgaaaaagattcataaagacacgtactatgaaatcgcgaaaacaacggctgaaatgccttatctggtgtatacagttaacgatgataaagaaccatggggacggaagaatatcatgcttacaattgatatttacggtacttctgctcatcttagtaaaatagatgaactgattatgaaactagaaaacaatcttcatagaaaaagattaagcagcgctgaatttggtgctgctatttcttatctttcaagtcagaaagtacctgatccagacccgaatattagacgcaaagaagtgcgattcattttacgaacttattttaaacaatagaaagggttgattatatggcagctccacaaccaaaaccagagaatgtcctattcggagattggggtgcatttttctttaattatggagaaaaagacgaacttcctgtaggcgctacacaaggcggtggctcatttaaatacgaaccagagtttaaagagattgaatatgatggttctccaggtgacactatggggatgaaacgtattacaaaatcaaaaactcaaattagttttaagacacttgaatttttggataaagaaaaaatcaaaaattttattgcgggtttaaaagtatcagaagagactgttacaaaagacgggaaaacaattaagtacgacgtgattgaagctacagaacgtctaacaaaagatagctatcttaaaaacgtagcatgggttggcgaaactttaggtggagatatcgttgaaattatcgtatataacgcattatctgacggttcattagagctaggatttgaaaacgaaagtgaagttgttccagaagtgacattcacaggacatcgtgatccagaaaacattcgaaaagtaccatggaaaaaacgtattttaacagcaacagaagcagctgaattaataccagcaggttaaagagtagggaaaatccctgctctttttattttaaggaggaataaatgtgactattgcaattcaagaaaaagaatacaaagtgagacaaattcatggcggagatttattttctgtagttcgtattttgaagaaatcgaaatttaaggttgatattaacttacttaaagatttaatgacgggcgtacgaaataaagaaggcgcaacacaagctgatgtattagctgcacaagagacttttgggtacgacattatcatgaagtttattttcggattagaagaagcggaacaagaattctttgaatttgtagctggacttttagttcatgaagatgaaaatgataaaaaaacatctccagattgggaaacaatacgaactttaaatttagaagagttagttaagttgtttactgcaattaaagattcagaagttggattggttaagcttttttccaatgcggtgaacttgatgaaatagacttcatcgatacgttagcttctcgctatccaaatatggagtacataaagagtttggatgcagaaatagttattaatttgtatctcaccgcaaagaaaaaagagatggaccgcatgttatgggaagaatggtgcgccttacaaccgtactgtaatgaaacattccctcaatttaaacataagcgcgaaaatccaacgcaagaacaggtaaaacaatacaacgattcaatcgaacaaacaccgaaacagaaactcacaaaagaagaagtgtttgctcgtgttgcaaaaatccgcggaaaggcgggtgaataaatggaattatttaagatgtttgggtcaattttcttaaaggatgatcagttacaaagaggattggctaatgcagaaagaagcgggcaaaggaccacaggtatcttaggtcgtggatttggtcaagttggtgctgcggcagctggtttaggttcttctgttggtggagctgctatagctatgggcggattagtcggcatcgctgtcggtgtcggtgccgcagttgctggtgtagttcatgttggttctgagtacacaaaacaaatgtcaaaggtagaagctctttcgcgttcgaacggactacaaatggctgagcttggggctaacgctcgtaaacttggtgctgataccagatggtctgctaccaacgtagccgaggcctatgaatatatggctctcgcaggttgggattctaaccaaatgattgcagctagtaaaccactacttgatttagcaactgctggtgcattagaccttgcaaaggcttctgatatcgtaacagatacaatgacaccattcggaatgaaggcttctgaagcaggaagagcggccgatgtattcgcgttagcccaagcgactgccaacttaaatgttgaacaactcggcgagaccatgaaatacgcagctcctgtagctgctacattcggtttaaacatcgaacaaacggcagcaattgctcaaatatttgcaaataacggtatcaaagcttctatggctggtactgcattacgtgccggattatctcgtttagctgccccgccgaaagaagcagctaaatcattatcagcattaaatgtaactgtaaaggattcacaaggtaatttaaaaccaatgaatgaaattatcggtcaattacacgatgggttcgggaagttaactgacgctcaacaaatcgctgctgcaaaagcaatcttcggtgaagaagcgtatgcaggatggattcaagttattaaaggtggtaaacctgcctttgatgatatggtaaataccctcgaaactgctgaaggctctgcaaaggttatggctgaaacaatggcaaataacttatcaggtgcagttgatggcgttaaatcacaattagaaaatttaggacttgttgttttctcgcatgttgaaccagcacttgttgcaatgacaaacggaacaaatagtgctgttaaatctcttactgactggcttgatccatctggtagagctgttgaagcagctaagctaatgcaacaaactgatcagcagttagctcaatctaaagccattcttgatatgaatctcaaaaaagggaagataacgcaagaagagtataatgaaaaacttgctttatctaagaagcacgctgaagatatgatgaatgccgatggtatgttagctcagaaaaaagaagagttaaaaatgaaggtcgaggaagggaccatgactcaagaagaagccaataaaatcctcgaccaatctgaagttgaataccagaaacttcaacagggtattgagcaaactcgccaacgtcaagaagcgatgaataaagtattcgaaccacttcgtgatgcaattggaatcatccaacaagttggcgctgctatcgagcaattctggattgctgcaactggggataggaatgcgctagttgaaggttatgacatccttactaaactagggttttcagctaatgcaattcagtttatacaagaaactacagcggcagtgcaatatggtgtagaaactatgaaagctctcgtatctggtgattggggagctgctagtaatttattggataagttagggttttctccagaacaaaaagtggatattatcatgttcgttcaggatgtacatgcccaattaagtagttttatagaaaatgtacaatctctaatctcagctgctgctcctgtaattatgggaataatcggggctacttgggattttattaaaggtgtattcaatacaatagctccttacttaatgcctttattaacagatgtgatgtcatttgtgaacgggattatagcaaagattgcggcgttttggaaagaaaacggggatcagattgtccaagctgtaaaaaatgcatttgatcttataaaaggcattattgaatttgtaatgcctgttgttctattcattattgaagatgtatggggaaacataaaaggcgttataaatggggccttagatatcatcttagggacaattaaactattttcttccttgctgactggtgattggaccggcgtatgggatgccattaaacagattttatcaggagcatgggaattcatttggaatttcattcaaatatggggtgttggaaaggtacttggcatcattggcaaaataggcagcaaaatgaaagggctgtttggagaagcttgggatggtgtaaagaaggtattctctgacatgttcgagggtatttttaaaagctcaggagacacccttacagtgataaaagaagtattcggaaaagtgaaagatgcaatcgcaaccccatttaaaaatgcttgggaaggtgttatggagtggattgataaaatcaaaacaggcgttaagaacatgtttagtggtgttcatattcctgttccgaagattaatataaacggatcattaaacccagcgcgttgggctgatgaaggtttgccatctttcgacgtcaaatgggcagcgaatggcgctttaattaaaccgggtaatccgacattgattggtgttggtgatgcaagaggatatgatgaaacagttttaccgcttcgcaaacaaacattcgacgcgattgctaacggaataatggggtctctaccattaactcaacaagctggagcacaacaatatgcatcacaaggtccaactattttgcaagttaatttaaacggcagagaaatagcaaaggaaatctactcagatgttagtaagtttcaagaaagcgagaaagaaagattgaaagtattttaggtaggtgatgatatgactggaatcagtttctttagttttaacgggaaaagaaattcaaatgtaatcccattgcagggtaaaaaacgccctgcatgggctcctttggaacgtacattccttgaagtccctcactatccaggtgggcgtttgataagaacacaaacaaaaatgagaaaaataattataccggttgcattattttatgaatctatggaagaggctgaaaagttaaaggaagaaatagctaattggcttattacagatcaacctcaagaactgatctttgatgatgaaaaagatcgcacgtatttggcccttattgatgaatcgtttgacccacagcaattagtgaatttaggagaaggagtccttacttttgtttgtgaaatgccatataagttaggacctactaaaacggtagaatttgaaatggatggacgtgggttaatagcaaatgttcaaaataaaggtactgttcattctaatcctataattgagattgaaattacgaaaccgaacacttttttagatgtatggtttggtggggtatctttaagtgatcgagattattttcgtattgggatgccgctaaaaactgtggaaaagcctgtagaaaggaatcaaaggcttatatgggatgaaatggccactacggtcggatggagtaaagtcagctcaatggaagatggggaaccggttggtgaaatgaaatcagataaatatcaattttattgttctgattttggaacgggaaaaggatggcacggtgcagctgttaaaaaaagtatccctggtggcccagtagaagattttatcatgcaagcttacgttacttgtaagagcaagaaaatcaatgaaatgggacgagttgagatagcgatactcgatgaaaacagtaaagttctttcaaaaattgccatgaacgatctctattggcaagccgaacaaaattttggaacgatggttattggatacgataacaaaccaggaaaaacaggtttaatttatgagagtggtgattatccaaatacatggaatcagtattatggtaggttgtggattgctaggaccggaaatgtatgggaggcttatatttcaaaatttcttcctggaacagaaaaagatggttcagaacgctttgcgagatggactgataaagacaataagcatatggaaaaagcagctcaaatccagattagtatcatgcagtggcaagatgtaccaccagtagaagcgatgacagtttctgatttgaaattttggaaagtaaatttaaataatcaaaatacaccaccttatatattcgatgttggtgataaagtagtgatcgatacagagaacactcacgtcagtattgaagggaaaaacgcgattaacataaaagagtttttcagtaattttcctgttattaataaaggtgctaatataatcgaaattatgccatctgatattggaacagcaaaggttacatatagggagcgttttagatgagaacaccaagtggattacttcatgttgttgattttaaaacagatcaaattatatcagctattcaaccaaaagattactgggctgataaccgtcattgggaaatcaaaaataacattgatatatttgattttacaacttttgacggcactccacatgcaattacattacaacagcagaacttggttttaaaggaagtacgagatggtcgcattgttccgtatgttattaacaatgaagtagaaaaagattcaaatgatagatctttaactgtacactcgtctggtgcttgggttcaaatagcgaaagatgggattattaaacctcaacgtatagagagcgaaacagttaatacgtttattgatatcgctcttgccgattcaaaatggcaacgtggaataacggattattcttcattccacactatgactatcgacgaatttattgatcctctcacttttttaaagaaaattgcttctttgtttgagttagaaatccaatatcgcgtcgaagtaatgggttccaagattaccggctggtacgtagatatgataaagaagcgagggcgagaaactggcaaggaagtaactctaggaaaagatttagttgaggttagaagaattgaacattctagagatatttgcacagcacttgtcggatttgtacgaggtgaaggtgacaaacttatcacggtggagagcataaataaaggactaccttacatcgtcgataatgacgcatttcagcgatggaatgcgcatggtaaacataaatttggtttctacactccagaaacagaagatcaaaatatgacaccagagcggcttatgactctcatgaaaacagaattaaggaaacgagtcaatacttccgtttcttatgtagtagaagcacaatcgattggacgtattttcggactagcacatgaactaattaacgagggtgatacaatccgaatcaaagatacaggcttcactcctaagttatacctagaagcacgtgtaattgctggtgatgaatcttttacggatcctacacaggataaatatgtgtttggtgattatcgtgaacttactgatccgaacgaggaattaaaaaagatttacaatcgaatccttagtaaattcggtgagaaacaagaaatactggatcagttagataaattagtgaaagatgcaaatgaaacagctagtgatgctaagaaagaatccgaagcagcgaaaacattggctgaaaaagtacaagagaatcttaaaaataacacggtagacatcattgaagcaaagaatccaccgacaacagggcttagaccttataagacactttggcgtgatattagcaatggaaagcctggtattttgaaaatatggacaggcgcagcttgggaatcggtcgtacctgatgttgattcagttaagaaagaaacgttggaacaggtgacaaaagatattaatgctagtgcggaaaagctagatgctagagttaaagaagctgaaacgaaagcagacaatctacaaaaagacttcaatgctgttaaaggagaacaagaaagagtcagtcaggtaactaaggcgcttgaagaaagtgacgaggcaactaaagaaacaatcacacgtatacaaggtactcaagaagatatgaacaaaacaatcgttgagactacaaaaggcgttgaagggctacaaagtactgtatccgatattaaaaaagatcaaaacggtattacagatcgtgtagtaaaaacagaacaaaacattaacggtatttccagttccattgaacaaatcaacaaaacgtcatcacaaacaattcaaaagttaaataaagttgaagaagatgcaaatggaacaaagcaaaccatcgaacgaatcgaaaagaatgtaaataaccttgatgatgatgttatcaaccttgtaagaggaactaagacgttaacaactaacgaagaattatctttaaaaggtgctcgcctatctgttattaaggacacgtacaatgggaatgctatcgcgcaaactgatacagaatggcaaggtatagccgttaaacccagtgaattaatcaagcgagggaaaataaaaattggtgatactgtaacattttctgtaacagctagaatgataggtggggaatctacacaagtattctttcctaacagtgctggtaaaacaacagttaatggagaatggaaaagagtttcggtaacaattccagtcggatctgatgccgctgatccaaatgttgtatatagattcgaagctgaatcaatacctaaaggcgctttataccaacaaacttcacctatgctatcgttaactaaaaaagtttatccgtggagacctgcacctgaagaccaggcagacagtaacgaatttatcaaagttacaactgaaattaaagcagaagctgggaaaatctcgacaaagttagaacaggttgaggctcgtactgtaggcgttgaaaactggctaatcaatacaggcccaaacgaaagacctcaaacaatcgggatgattggtggcgcggtgttgaataaagttacatcatttgttcagcctggcgaatacgtagcgattgaatgtcaagatcatacagacgccttttatcaattccatctagataatactaagataggagactttgaaaaagggaaagatataacaatatctttagacattcaaaatgatgtgcttttagattttattttattccaatacatcaacggatcgtggagtgagtcagtacaaaagcctgtgccagctaaagactggcgtcgtgagtcatggacgtttaaaatcgatgttcgtgctactggttggggatttagaattcgttttgctagaaatgaagcatctaaagggaaaaggtttcgtttcaagaaagctaaactagaaaagggttctgttccaacagacttcagcaagtcaacatatgaattagagcaaagtgtggatggtgtaaaatctactgtaactaaggtgcaggataaccaagccggatttgataagcgtgttgctactgtagaaaaagatgcaactaccattaaacaaaatgtctctttcatacaaaatacgcagacagaacaaggaagacaataggttcgaggtggaagcatggtgacatgtggagctgacgaatactaatagatcgaggacttaaccatataatatgtagcaatgttatctagttttgaaggaatatgccttcatagtttggtgatgatggcagagaggtcacacccgttcccataccgaacacggaagttaagctctctagcgccgatggtagttgggaccttgtccctgtgagagtaggacgtcgccaagctatttatattgtcgcggggtggagcagcacggtagctcgtcgggctcataacccgaaggtcgcaggttcaaatcctgtccccgcaaccaaatggtcccgtggtgtagtggttaacatgcctgcctgtcacgcaggagatcgccggttcgaccccggtcgggaccgccatttcatataaagaaaagaacgaaacaagttgtttcgtatttttttatttgttttaacaaaaaactaataaagacagtcaaactatccttaggacaactcctaaggacttttttatatattcaaaacctgtataataaagagcagagaacattgtgagtaaagtaggtgaagtctgtgagtaaatatgaagtaacaacaaaatcttctgaggaaacacaaaggttatcagaaaaactaggtaagctcgtagaggcacaagacgtaattattttagaaggagatcttggagctggtaagacgacttttacaaagggactagcaaaaggtcttggagtgaaaagagttgtaaatagtcctacctttaatatcattaaagaatataaaggaagattaccgctatatcatatggacgtgtatcgcttagcagaaagtgaagaggacttaggctttgatgaatatttctacggtaaaggaattacggtagtagaatgggctcatttaatagaggcatatttaccaaatgaaaagttacaaattagtttattccatgctggagatgacacaagaaaaattatactcgagccaattggagatcgctatattagattatgtgaggagctattacaagatgaaagtactagcaattgatacttcaaattacgtaatgggtgtatcccttattgaggaaggaaacgtaattggggaaatcattacaaatttaacaaaaaaccattctgtacgtcttatgccagctgtagagaaactgttaaaagagtgtggcgtaaaaccgaaggaattaactaaaatcgttgtagctgctggacctggatcctatacaggtgttcgcataggcgtgacagcggcgaaaacattagcttggtcacttcaaataccaattgtaggtgtatcaagtttagaggtagtagctgcaaacggtgctaactttagcgggttaatttgtcctttatttgatggaagacgtgggcaaatttatactgggttatatacatatgaaggagagcagttaacttcaatagaagaagaccgaattattcttattgtggactggttgcaaatgttaaaagataaaggacagcctgttttatttatcggtaacgatgttaaattgcataaagaaacaattatagaacatttaggtgatcaagctgtattcgctccatttactaaaaataacccaagaccaagtgagctagcattcttaggattacaaaaagaagaacaagatgtgcatacgtttgttccaagctatcttcgtttagctgaagctgaaacaaagtggttagaaagtcaaaacaagtaggagcttgcagaagatggatatgatatttagaaagatggagcttgatgatattgctcaaattgtagctattgaagaagcgtctttttcaactccttggactgcagatgcctttcaccgtgaattaacgatgaatgaacatgcacattatattgtgttagaaaaagatggtcgtgtagtcgggtattgtggattgtggataattattgatgaatcacatataacaaatatagctattttgccagaataccgaggtcaaaagttaggagatgccctattgaaagcagttatttctgaagcgaaagaactaggggtaaaaacaatgacacttgaagtacgtgtatcaaatgaagtagcaaagcagttatacagaaaatacggatttcaaaatggtgggattcgtaaacgatactatgcagacaatcaggaagatggtctcgtaatgtgggtgaatatataatggaaaaaaatacgattatacttggtattgaaacaagttgtgatgaaacagcagtagcagttgttaaaaatggaacggaaattattgcgaatgtcgttgcatcacaaattgaaagtcataaacgttttggcggcgttgtaccagagattgcatcccgtcatcatgtagaagaaattacagttgtgttagaagaagctttaaaggaagcaaacatcacatttgatgatattgatgcaattgctgtaacagaaggtcctggtttagtaggagcacttctaattggagtaaatgcagcgaaggcagtagcgtttgcacatgatattccgttagtcggtgttcatcatattgctggtcatatttatgcgaaccgtttagtaaaagaagttcaattcccgttattatcacttgttgtatctggtgggcatacggaacttgtttatatgaaagaacatggttcattcgaagtaattggtgaaacacgagacgatgcagctggagaagcatatgataaagtagctcgtacgttatctatgccatatccaggtggtcctcatattgatcgccttgcacatgaaggagaaccgacaattgatttgcctcgtgcatggctagaaccggattcatatgattttagctttagtggattgaaatcagcagttatcaacactgtgcataacgcaaaacaacgcggtatagaaattgcgccagaagatttagcggcaagtttccaagaaagtgtaatagatgtacttgtaacgaaagcagctcgtgcagcagaagcttataatgtaaagcaattacttcttgctggtggagtagctgctaataaaggacttcgtgcgcgattagaagaggaatttgcacaaaaagaaaacattgaattaattattccgccgctatctttatgcacagataatgcagcgatgattgcagcggcagggacaattgcttatgaacaaggtaagcgtgcaacattagccttaaatgcaaatccaggattagatattgaagcatagttatacacataattaaccacaggttgtggataaaacccatattgtctgttgataatgtgggttttattgtgtatataaaatgttgataacttttttattaattgtggataatgtggaaaagttattttaaggtttattttataaaggtggatatgtgtataaacttgtggataaataggatgatgtcagacctttgtgtttgttctttttcgggaaataaaaagtaagaagatatccccgaaaaacattttgaaacatccccctattatagaagatgctaatattgtcaatctttgtcgttaaatcgatatttcgtgtcgaactgttaatatatatagggttacaatagatatatttgaaaaatcgttggtatattctaagttacgattgatatactcaaaaaattgtttctgtattaaaagaaaaaaagatgtcgcatagtcaaaaatcctgacttatgagacatctttcttatttaaatatgcttatacatgcagctcttcccattctgccatacaagtttcaagttgttcttgtagcgtttgctttttagttgtaatttcactagctttttcataatctgcatatatttctggtaagcaaagttgatcttctaacgtagcaatttcttcttctaattctaatatactttgttctagctcttcaatttttctagtgcgttgacgctctagttttttacgctctttttcttctaaataatttaatttctcttgtgcaaccaccttttgaacaggaatgtcactttcttgctgttcaagttctgcacgttcaatcatttcatttttcttttcaacgtagtaatcgtaatcccctaaatattcctgtgcaccttctgttgataactcaaccacagtcgttgttacacggttaataaagtagcggtcatgtgagacgaatagaagagtccctggataatcaattaaagcattctccaaaatttctttactgtttaaatcaaggtggttcgtaggttcatctagaattaataaatttgatttttgcatcataagttttgcaagagctaatcgagctttttgtccaccactaagggaagatactggtttcagtacatcatctcctgtgaataaaaaattcccgagtatagtacggatttctttttcaggttgcagtggatattcatcccatagttcatttaaaacccgtttagaagatgttaagtttgcttgttcttgatcataataaccaacagatacatttgatccgaaagaaacatcaccatttaatagtggtaacttattcacaatagactttaacaatgtggatttcccaattccgtttggaccaactaaagcaacactatctccgcgagttaagcgcatagttacatgttcaattatagggttctcatcatagccgatggttgcatcatttacttgtaaaacatcatttccactttgcttttcaatatcgaagtggaatgatgctgacttagaatcccctaatggtctcgttaataattccattctgtctagttgtttacgacgactttgagcacgtttcgttgtagaagcgcgagctatattcttttgaacgaagtcctcaagttttgcgatttcatcttgttgtttttcgtaacgtttcatttcttgctcatataatgctgattttaagtctaaatatttactgtagttaccaacaaatcgtctgctttctttattcgaaatttcatatacttgtgtaacgagtttgtctaagaaataacggtcatgtgaaacgattaatattgcgccaggataaccttgtaaatattgctcaagccacgttaatgtttcgatgtctaaatggtttgtaggctcatccaaaataagtaagtctggttttgttaataataatttcccgagagctaatcttgttttttgcccgccgcttaaagtagagatcgtcgtctggtgcgtttcaactgggaagccaaggccgcttaaaatggagcgaatatccgcttcatattgatatccaccttgatctttataattgagttgcaattggtcataatcagctaacaatctttcatatgtagcttcgtttgaaaagttttcttcttttcccatttcttgctcaagccttcgaagttttgtctccatttgctgtaagtgggtaaagacggttagcatttcatcccaaattgttaaagacgtttctagtccagtattttgagctaaatatccgattgagacatctttcggttttataatttcgccaccatcatgagataattcaccagcgataatttttaataatgtagatttgcctgctccattccttccaactaatgcgatacgatcttttgtttgtacttccaattttatgtttgcaagaatcgtttctgcaccgtataatttcgaaagcgcgtttacttgtaataaaatcaatgttttcacctcaaataatttcttaactttgccatgtttatatttctcaatcatactaaaaatagtgtatagtttaaaataaagagagaatacttcttctctttattatacaaggaatttaatgagtgctaaacttctgtatttgattaaagtatatgaataaagataggaagagaggagaggtcatatggatcagcaaaagattccacaagccactgctaaaagattgcctctatactatcgatttatccaaaacttatctctttctggtaagcagcgtgtttcatcggccgaattgagtgaggcagtaaaagtagattccgcaacaatacgaagagatttttcgtattttggagcgttagggaaaaagggatatggatataacgtaaattatctattatcatttttccgcgaaacacttgatcaagatgatataacacgtgtagcacttattggagtaggtaatttagggaccgctttcttacattataatttcacgaaaaacaataatacaaaaattgaaatggcatttgatgttagtgaagagaaagttggaacagaaatcgggggcattcctgtatatcatttagatgaattagaagagagattatcaaatgatatacaagtggcaatattaacagtaccggctacagtagcacaagctgtagcagatagattagctgaaacgagcgtgcatggtattttgaatttcacaccagcgcgattaaacgtatcagagaatattagaattcatcatattgacttagctgtagagttacaaacattagtttactttttgaaaaactatccacaataaaacgcagaggaagcgacctctgcgttttattattgtttcttctttgtgaatttaattaatataaggcgaagtgccaaattaaaatcaattgttgccataactgcaaatagtattgtccacatattccagattgtatctgtcacgttcgtaatggcgaagcgtgtaaagatacatccaagaaggaagtatagtgcagccatgaacaatggtgagtttctcatacaaaaaatcctccgataaagccttgcattttttcagcttctttaatcatttcttgaatttgttcattgctcataaaaatttgcccaatagcgaccaatgtattcatcgcaacatgagctgcaatcggaacgataatccgtttcgtcttcacatataagaaggcgaatacgagccccatagcagtgtataccaataaatgagtaaaatcaaaatgaattgctgcgaatacaagcgaactaatgatagctgcgataaagaagttaaacttcttataaagtgcaccaaataaaatttttctaaatacgatttcttctaagataggtccaattatagatacaacaataaggaaccaaggggtcgttcttgcaatctccattagtttcattgtattttctgaaccttgtttaattcctagcagctgcatctcgatcataccggcaactatttgtgaaaagaaagctaagaagaacccgatgaaaatccatccaatagtagctggagcagaagagcgctttggatctaaatgcctgtcacgaatatctgttctaagtaaccaaagtacgatacataatgcaacaaagaagctaataattgcccagtgtcccgttatgatttgtcctttttcctcaatggtaaatcctctattatcatagagtcctgtttttaggagaagtggcaatccaacaacgccagataactgcattaaaatgtatgtaacgataatccaccagtattgtttcttcaaatggtttaaccatcctttctaactatagtgtatgagataagttaggataacatgtaaatatgctacctacgatataaacctcacttgaattatgtttttttcgtaaatccttatttgaaattataatagaagacaggagaaagttgtgtgtgtagcgaaaacaacttagggtgtcctttcatattgtaacatacgagcagtggaaacaacgattcatatagtaaaggcagtattctatatagaaagtttatatagtgatttgcgaaaaaattatgatttttttacttgcaaaagaaattgagattatttattattataagtgtgttagcactcggatgacttgagtgctaataaaagaaatttacataacaaaatgaggaggttattgttcatgctaaagccattaggtgatcgcgttgtaattgagcttgttcaagcagaagaaaaaacagcaagtggtatcgtattaccagatactgcaaaagaaaaaccacaagagggtaaagttgttgcagtaggtactggtcgagtgcttgagaatggtgagcgtgttgctttagaggtagcagcaggtgatcttatcatcttctcaaaatatgcaggtactgaagtgaaatatgaaggtacagactacttgattttacgtgaaagtgacattttagcagttatcggttaattatataaatcttaaaaaatccaagggggtcaattattatggcaaaagatattaaatttagtgaagaagcacgtcgttcgatgcttcgcggtgtcgacactcttgcaaatgcagtaaaagtaacgcttggaccaaaaggtcgtaacgttgttcttgagaaaaaattcggttcaccacttattacaaatgacggtgtaacaatcgcaaaagaaatcgaattagaagatgcattcgaaaacatgggtgcgaaactagtagcagaagttgctagcaaaacaaatgacgtagctggtgacggaacaacaactgcaactgtattagcgcaagctatgattcgtgaaggtcttaaaaacgtaacagctggtgcgaacccaatgggtcttcgtaaaggtatcgaaaaagctgttactgctgcaattgaagaattaaaaacgatttctaaaccaatcgaaggtaaatcttctatcgcacaagtagctgctatttctgctgctgacgaagaagtaggtcaattaatcgctgaagcaatggagcgcgttggtaacgacggcgttattactttagaagaatctaaaggcttcacaacagaattagacgtagtagaaggtatgcaatttgatcgtggatatgcatctccttacatgattactgattctgacaaaatggaagcagttcttgataacccatacatcttaatcactgacaaaaagatttctaacattcaagaaatcttaccagtattagagcaagtggtacaacaaggtaaaccacttcttatcattgctgaagatgtagaaggcgaagcgttagctacattagtagtgaacaaacttcgtggtacattcaatgtagtagctgttaaagctcctggatttggtgaccgtcgtaaagcaatgctagaagatatcgcgatcttaacaggtggcgaagtaatcactgaagaattaggtcgtgacttaaaatctgctacagttgaatctttaggacgcgctggtaaagttgttgttacaaaagaaaacacaactgtagttgaaggtgtaggaagcacagaacaaatcgaagctcgcatcggtcaaatccgtgcgcaattagaagaaacaacttctgaattcgatcgtgaaaaattacaagagcgtcttgcaaaacttgcaggtggcgtagcggtaattaaagtaggtgcagcaactgaaactgagttgaaagaacgcaaacttcgtattgaagatgcacttaactcaactcgtgcagcagtagaagaaggtatcgttgcaggtggtggtacttcacttatgaacgtatacacaaaagtagcttctatcgtagctgaaggcgacgaagcaacaggtatcaacatcgtacttcgcgcactagaagagccagttcgtcaaatcgcaatcaacgctggtctagaaggatctgtagttgtagagcgtctaaaaggcgaaaaagtaggcgttggtttcaacgcagctactggcgaatgggttaacatgcttgagtctggtatcgtagatccagctaaagtaactcgttctgcacttcaaaacgcagcatctgttgcagctatgttcttaacaactgaagctgtagtagctgacaaaccagaaccaaatgcaccagcaatgcctgacatgggcggcatgggcatgggtggtatgggcggaatgatgtaaccattaaggttaaagcttgatatataaagcttttgagcctcaatagttacgtttcggtcacgctttggtcactaatatttaaattacgaagcctttcattagttcgctgaacttttgagaggctttttcttccatattttttgtcatgtgtgcatatatgttcatagtagtttcgatgtctgtatgccctaaacgttgttggatttctttaatacctacaccagcctcaataagtaacgatgtatgtgtatgcctgaatgaatgaggagtaatattttttgttatattggataactttataaggcgctttaatctattctgaaccattttaattacttcgggatagccgcttgcttttgtaataataaagccttgatctacgtatttaggacgtgtgtatagctttaactcattttgttttgctttatggctttttagcaatttcatgataccatgatccattttaatggttctgatagaacctttagtctttggtgtaagtaaatgatagcgttggctattgttatctggattatataacgtcttagttattttgatagtattgttttcaaagtctacatcagtccactttaaagctaataattccccggcacgcaatccactgtatgctaaaacagaaaaaaatacataatcgttatctaatcctttttcctttgcgacctgtaagaaatgcgctaattcttctttctccaggtattttatagccttcttatcgttttctatatcttctactgtctccacctttctagggagttttacgttatctgtagggttgaattttattatttgtaactctatagcctttttaaaaatcattctacctgctgtatggatgccatcaagtgtattaaacgcatatcctttatcatgtaaatcatttaaagctgtttgatacatcttttttgtgatatctttcattttgatgtttgcgaaaaagtcgactaatttatccgactgcttttgtctaacacgtaggctacttattttggtgcttttgctgtaaatgttaagccactcttgcacaaaatctttaaataatatgtcaggttcattgatgtaagttccattagctacttcttgctctatgcttgctgcagctaattgggcttctttttttgttttaaaaccccttacttttttctgcttccttttccctgttgctggatcaataccaatttcagcgattaacaaccatttatagccttgttttgtttcatacttttggaatgaagccattttatcacctcaatataataaattaactattataggcaggcagtccacctataatagttcatcttgtccaaataactgatttatagcattagtagaatctttttttctttttagttcattgaattcaaaatcaataaccctagatattctttcataaaattcgagatattcacggccgcttaaaataacatgttcatttgtttcagtgtcggttatttgatttgtactagttggacttaaatttaggtgatattctccgttagtattaagagtctccttatgataacccagactttctaagaagctttcaaagaagtttaggtcatctgaaagttttagtagtcctttagcggttttatcgttaaataaacttggctccttttctaaagcctctacacctctttcagcaattttctgttctattgcttcatgatttacaaataaaaaagtatccataggaacattaagtgccttagctatattattcagtacttcaaaggaaatttttcttttgccgttttcatattgggaaattgcttgttgagatactcctatcatttctcctaatacaaatgctgaaattcctttcgcctttcgaatttctttaattaccttacctatgttttcttgcatgttgtttaccctccttgcttgtattatatggaaaaataataaacattacaactaaatgaagtaaaaataaataaaaaccgttgacacaacaactcaatgaggtatattattgtcttacaacaagaaaatacaacaaatagtagtaaaaatcatcaaaagttatgtatatctatcatattgaatgttttactttaaagaacttattaaaaaggagggtgagtagtgaatttaaaatttgagttaccagatgatacgttgataacttctcgttctgatttgaaaagtttattacgtgagttaaaagaggaactgcaggaagaaaaaatgcaagatgatatttttacaattaaggaagcagctgaatatatgaaagtaagtattccaaccgtacgatcattaatagctacaaatgaaataccttattttaaaaggggacaagttattcgtttgaatcgttgggatatccttgactggatgcgtaaggataaataggaaactatgaaaatataaaaagctactaatattttgttggtcagatggtctattgcggaccgaacataaatgcaatgttggaaatgatagctgaaaaaaagacggttgcaacgtcaaattaaaaaaatgaggtgaatacatatgaacggagtattgtctgcaacgaggttaatgaaggcgcatgaaattgtaaaacgatgtgctgtagcaagaaaaaatcctgagattttagaagctatggagtttgaagctaagaaaagattatacgaaattaacaatagtaaataaggagcgttagaaatatggatcaattagtagcagtcaatgaacaaccaaatttaaaaaatttcacaagtgaacttgatggtgaattaggatcgctgggagtaagcgttgcgactttaacagatgtagaagttcttttagcgcacttagtagaggatatggatacagcggtatacaaaggtgaggaaatttattgttttcgtgggtttcatagaaagctaagagtgtattggcgcctgctcaatcatacgatgaatgaattaaataaagaatatgaaagagtagatgaaattaaagatggattatttaaagaggtagtaaagaatggtgaaaaaagacaataaaaaaagatatatgaactgcgaattcatatatcctcaagaacaattatttatctacttatattttaacattgagttcgtcttgtgacaagggaggtgagaagttgttatctacagcagcgaattatacagaagcaattaacaacataatgcctggagcgaaaattattaagcttactggatatgcaaagggcaatcaagagtatcaaaaagcaaaaacaccagtaggttcttggaaagtcacgcattcattagataacgatcaaattaatggatggcttggtcaaggtggctggatagggtgtgttgttccaaaaggtattttcattgtcgacattgacgattctaaagaaggtcagttactaagagaattacttgaaggagaaaacattcatcaccatttaattaaaactcctaatggctggcagtttatattcaaaggcgaaacggatttaacgaaaaaagaaggtcagtatcagaattacgttaatcgtttagggttaacacaagatacacgagcagtggaaaagggttatatcgtattcccgaccgaaaatacagaagggcgtcatgttgtaactcaaagtctagaaaaattggacgagcttccacagttcttatataaagcatggaatggtgcgaaaacaccttcacctatgagttatccatatgaaactaacggttcacgtgatggggatttttatgatttagccagaaggttattaatttgtaaggtgagcaaaaaggaagtattgtccagtcttaaattggctcacaaatactttgtttccttcaaaaaagggtttcttattaaggatattacaaaggttgttaattcggcctataagaaggtcaatgaaggaaaagcggatgagggaataacaaacgataatgagaaaaaacaagaggattctatcattcctgtaaatattccatctccttacaaagttaaaaataatgctttatatagagtggaaactaaggtcaagaatggagaacttgatgaacgggaaatcatggttgctaggcatgttccgattctaaaaagagaactacataacgttgaacgtcaacaattatattatgagttaacctggaatgatagagggaaggtcgtcaccgagattgttccagctggagcattggtcactaagagggagatgatgccattagcagataaagggtttccttcaaatgataataacataaagcagttaatagattactttgataaggttttagcgtttaccgagattgatagagggctgatggtagaccgtttaggttatgtgaaaagtggtttggcccatccattactagcaacagattatgaaatactgcctaatgatcaaggagagcagcaactttttgaatcattccaagtagctgggacagtccaagggtggatagatgaagtatttaatcgtattaaagcccatccgagagcattattttttgtattagcatcctttgctagtgtactgcttcatgatttaaaaatagatcctttcattgtggatctttctagcggaacttcaaaaggaaaaacaagcgtattaaaagttgcagccagcgtgtgggggacaagtgaacttgtaaatgaatttaacgcaaccaaagttagtattgaacgtaaagcatccttcttaaacagttttcctttgttaatggatgatagccgtaaagcggatgaaagattacttcaatccattgtttataacttcagtggagggaagtctaaaggtaggggttctcttagtggttcgcaaagagaaaatacatggaaaaatatcatgttaactactggagaagtaagtctaaatgaatatgcatctaaagctgggggagctgctgctcgaattgtgagtttaaatgatagcccatttgaaggagtagattatatattcttcgctgatttatataaggggctagaaacaaattatggagtaattggtttagagtttttaaaacagtaccaagtacgtaagaaggagttgctcccatctttttataaatttaaagatttttatatgaataaagcacagggaaatgaggttttaacaagattatccctttattatgcaacagtccattatgcaggtagactcctaaaagaatttttcaaggttagtgtagatcttgagcaactggacaagctttttgacgaaattgcccaagaaaataaagcaatagataaaccaaaagaactattgaatgaaattttaacttacttggatagtaatagggatggtatttattatgactatgctcccaaaaatatcaaagcaatttataagtttagttcaatttgtttaacaccatcttttttaaaagagttcttaggaccagaagaaaaaaggactagaaaagagtggttgaaaaggggatttactgttcctaatgttttagatgggaaagcagttgattatcaaaaaattagccataaagggcgaaaaatcaatgctgtaactataaataaagagattgtccaacaattaggttttgattttgaagaaaatccacctaataactaaggggtaccaagagtactaagaaaataaagttcattttatagatttggtactcctaaaaacattgatatagcaagtattcaatacgaatagtactaaaagtaccaagagtactaagaaaataaatatatattttatagaaaaaactattcataacttttttctataaaacccatatatatgtactttgaaaaaacgtggtacttttggaactttaagaactgaagtggagaatatgttgatatgacaatgtttttgcggaagtactaaataagaaatgcgctggaactgtctagaactcttggtactaatcaaatgaataaggatggtagaaatggcaattaaaaaaattccaaccgtactagcaattgaacgtgataaaaaaggaaatcttagtacatggtgtcaatactgtggaaagtttcatcatcatggaataggtgaaggacatagagatgcacattgttttgaggaagatagtccttatattcgtacaggctatatccttaaaaagatgaaattatcgggtaaagaggttgtgaggatgggggaaacctcatgaatgaaatattagaacgattgaaggaacaattagaaattcatcgtgatgatgaaaaggtaatggtagatcgtttagaccttatgaagcttatacaagaatacgaaatagagacaggtagaaagaaaatatggctagatgagaggtggtgagtaaatggcgagttttttcaataaaatttttaaccgtaaaaaagaactgcagaagacagaaagagcagatgttatgagcggtggaccagcaatatttacaccttttagcggtaacgcttatgaaagtgatatttatagggcggctgtggatagcatagctagaaatgctgcaaagctaaaaggaacgcatgtaatgacatcatcagaccgtcggaaaaagggtgattataatttaaatcggattttacaagtaagaccgaacccttatatgacggcatatgatcttatttataagttggttactcattactatctttacaataatgcttttgcttacttagaaaaggacgacaaaggtaatttagttgctatatatccattgtcacctcaaagtgtggaatacctcaccgatctaacaggtgaaatgtattgtcgtttcttatttgcgaatggtcaacaagtcacattgcatttttcagaggtatttatagtaagacgtttctttaattctaatgatctattaggtgataccaatacagctattttgccagcgttagatttggcacatacgcaaaatgaagggttgagcaatgcaataaaatccaatgcaactattagaggtatcttgaaatacaatcaagttttatcacctgagaagctaaaagaagaaaaagaagctttcaccaatgattacttatccattggcaacaatggtggaatcgcagcaatagacaataaatatgactatatcccactagaaacaaagccgacaactattgatgataagcagcttgaagcggtgaaaaagaaaatctatgagtatttgggtattagtgaatccattgtgaatagcacttattcagaggaagactgggcggcgttttatgaaagtgtattagagcctttagcaattcaattctctttagaattgacggacaagcttttcacagagcgtgagcagtcctttgggaattctattatttttgaagcgaataggttgcagtttgctagtaatgaaacaaaaacaaacatcattaaggaattaatgccgttaggcttattcacaataaatcaagcattagaaattttaaacctaccaccagttgaggacggtgacaagcgactacaaacattaaatgtagttaatgcagcaaaagccgatcaatatcaacttaaagaacaagggggtaataaccaatgaaagaattgagagtagcagaactaagagcagccgagccggcaggtgacagcagccttattctaaatggtagaccgattgtgtacgatcagcctaccaccataaaagcaccatttggggaatatatcgagattattaaaaggggcgcattagataaagctgatttatcggatattcgcttactgtataaccatgatatgagtaaaatccctttagcaagaacacctaaaacaatgtcctttgcgttagattcggcaggattaacaatgagggcggaattaccagaaaccgaagagggaaaaagcgtttatacggcagtaaggcgccaagacctatcgggaatgtcctttgcttttaaagtaccagaaggcggcagccaatttgatgcaaagacgaacacaagaacaataaccaaaattgaaaaagtctatgagtttagtatttgtccatttcctgcatatcctcaaacgagtgtggaggcaagggcagctattgaaagttcatgggaaatgttgaaatcaacagaaagacaagcattaaaaataaaaattaatcaattattaatgaggagagtgtaagaatatgaaattcactacagtagcagaggcatttaatttttatcgtaatcattctttagcagaaatggaaacaagagcagcacaaattaagggtacagttgatactgatccaaatgcagatattacatctatcaatattgaaatcgaagggttgcaacaagcaatgaataacagtaaagaaaaagaaaaacaagcacaacaaagtcaaactcaaacaccaccagcaaacgaaggaacggcacaacgtagccaattcaatccgattactggaatgaactttaaccaggggcaacaagtaccaacagaaaatatttttggcagcgcagaataccgcagtgcattctataaaacaatgctagggcaaaagcttacagatattgaaacaagaacatttaaccgagcgatggaaattcaagaagcggaacaccgagcggatgcatttaacacaacaacgaatagtgcagctgtattgcctacaactacgttaaatgaggttatcaagaaagcacgtacaatgggcggattaatctcacattgccgtaactttaatatcccaactaatattagtgtaccaatcggaacaccttctagtaaggcacaatggcatgtagaaggggcgccagtagaaagtgaaaatgtttcaacagcaactgtatcatttaaaggctatgagatcattaaagtattttctatcagtgctgcagctaagaaaatgtctatccaagcatttgaagcatatatgactgatgaacttactaattgtgtaatggaagctattgcagatgctttagtgaatggtactggaagtggtcaaggtacagggctggtaacaggtgttacatggaatgatacaaatagctttgaaaatacagggaagtatacagactttacaaaagcattggctatgcttaagcgaggatatgcagcaggggcaaaatgggctatgagtaacgctacactatacaacgaagtatatagccttgtggatgcaaacggacgacctatctttattgcggatccaaagaatgaaagcattggatacattctaggtaaagaagtagttattgatgacaatatcgaggacgacactattattctaggaaacttccagtacatgggttacaacatgccgcaaggtgtaatgattgaaacatcaagagaatcaagctttaagagtggattagttgattaccgagcaatggcaattgcagatacgaaaccacttgtaccagaagcatttattaaactatctaaaaagcaagcataagcaaactaagtatgaaggggtatcagtatagcgctggtatcccttttatttaaaggagtgagtaaattgttaattagtatcgaggaagcaagggacacagtaagagtagatggtgaagacaatgacgtaatcatcattccgttattagaatctattccgtcttatctcgagataacaacaggaagaacatggacagatgatacatcagtacatccattagcacaaacagtaacaaagtttctcttacagttgtggtatgacccacaagatcaggatagtgaacgattaaagcgaacaatcgacaatctattagcggcattgactgtattaggtaggaatatgaaaaatggctaaggattatgcaaaatctttttataacagtgcaacatggcgtaaatgtaaagatggattcatgcaaagtaagcactatttatgtgaaagatgcggtgatatagccgttatatgccatcataaacgctatattacaccacaaaatattaataatcccaatataacgttgagttgggacaatttagaggcattatgccaaacgtgccataaccaagaacatcatagcagcgagatatgcgcaaatggattagcattcgatagcaaagggaatttgattcaaaaataaaacataccccccattaatttaagaaaaaggcatggctcgaggaccgaggaggagcctttcttttcctctccatgactttctatataaagggagggatggaaaaaaacaaaaaatgaaggtgattatatgaggacttctaagaaagttacagcgatttctagtgatatgaaaaaacttaaaacgatattaaggcagattcctaaagagcgtttaccgatagcgcagagtttatataacgagcttgtatttatgcaaactactttagaggctttaaaaactcaagtaaatgaagaaggaccgacagcaatgtttaaacaaggtaggcaagaatttttaagggaacatccagcgttaaaagcctataacacaactgtacagcgttacagtcttttgtataagcaattagttgatttattaccgccaacagatttaaaaccaaaagaagatgaactaattgactttattaagaggtgataacgtgaattatatacaagggtattggaatgcaattgaatctggagaagtaatggtttctaagcgagtttataggcaatataaacgattagttgaggatatagcaaaaccaagcaaatatgtctttgatgaagacaaggcaaataaacctattgaatttatagagcgtttttgcaagcacagtaagggagaatgggcaggtaagccgattgagttagaactatttcaaaaagcttatatagctgctttgttcggttttgtggataaggatacaggattaagacgatatcgagaaagtttattctatgtatcacgaaaaaatggaaaaacaacgatgttagcaggaatagcggcttatatgcttattgcggatggagaaggcggtgcggaagtttacagtatagctagtaagcgagatcaagctcgtatattgtttgatgaaactcatagcatgattcaacaaagtcctaatttatccaagcatattaagaaacgaaaaagtgatctgtattttccgcttactatgtctaaacttatgccgttggcgaaaaatagtaatacattagacggacttaatagcagcatggttattattgatgaattacattcaattttagatcgtaatttatacgaagttatgaagcaaagtcaatcagcacgacaacaacctatgttaattatgattacaacggctgggacagtcagagagaatatatttgatgatatgtattcgtatgcttgtaatgtagtagacggtaaatttgaagatgatagctttttgccgattctttacgaattagattcaaaagaagaatggacagaccctacaacatggaaaaaggcaaacccagctttgggatcaattaaaaaactagatgatttagaaagaaaagtggaaaaggcaaagaataaccctagcgatctaagcggcttacttacaaaggactttaatgttagggatacaataaagagcgcatggcttacatttgatgatataaacaacgaggaaacatttgatatacagcagtttagaaattgctatgctatcggtggagcggatttaagtgttactactgacttatcttgtgcaactcttttatttgtggataaagacaccaaaaaacggtttattcatcaaatgtattggctgccacgtgatagttttgaaaaacgagttcaaatggataagattccatatgataaatggctagagcaagggctattacgtctttgtaacggaaatagcataaattacggtgatataacagcatggtttgtggaaatgctcaacaattacggaataacacctttgtgggtttattatgacagttattcggctaagtattgggtagaagaaatggagcaacatggctttaaaatggttagatgcattcaaggagccaaaactttaagtcttcctatgcagcagatgggagccgatttgcaagcgaaaaagattaattataataattcacctattcttaaatggtgtttaactaatacaggtgtggaaacggatcgtaacggcaacattgtaccagtaaaaaatcaagctgctaagatgcgaatagatggaacagcaagtatgttagatgcttatgttggtttatttgagcatcatgatgaatttttaagagccttataggggagggagaattattatggctacaactcaaaaaaaggataagaaaataactcttttaacggcaacatggacagaagatgaaatgggacagcgaattccggaatgggaaccgttacccagcggcgaaaacatttgggcatattatcgacaagcttcagcagatgaattttttggagcggctgcaattaaatacaaaatagaggctatttttaaaattagatggcgtaatgatattgatccaactatgaaagtgcgttttagaggtactgattatggaataactcgaattgatgactttgaaggtaataaacaagacttagttatatatgcttatgtaattaaatagggggaatggaatatgtcaactgaaagattagaaaaagaattagataaggctttagatgactttagagaaaatactttatttaatgttgaaacgtttgaccaagtacacgaaaatgaatatttaacaaaggatgatctagaggaaatcaatcgacaagtcttttattgtctacatgattttaaaagtaaaatcgtaaaatttctaaaagaaaataaccgttaatgatatgaagaagggatgagcgcaaaattgcgcccacccttttttattgactaactatcgtctctagtaagtaattttcgctcgtgaaattttaggagcgaaatgtatcgtgagaaatgaagaaggaaaatctttggagggtatctctcatatattattttttggtcacatttcggtcacgaaacatatataatcatttactttttattttcttttttatcctctaaatttaaaaaaacgtagggtttacaggtttggaaaaagtcgtatttcttcttatttatatatctgatgcatgggcggaatgatgtaattccgtttgccctaaaaaacatccatttctatatagaaatggatgtttttttatgttttttagaaaaggaaatgaatttctgtagaattttgtcgctttctctcttgaccatattgatatttcattgttagaatctaggaagataatataaaacgatccttcatatatcctcaatgatatggtttgagagtctctaccgggttaccgcaaacaacctgactatgaaggcagtgtgtcttatatttataaagagcggagactatctttctttataaagccagacccctgccttttctttgttatgagactagaggcggaggactggctttttttattatattggtaatgcttttcgccaaattggtgaaaatatttatatacgagaactaacgttggggtgattattttgaagaaacaacacgatacaattatcgttttagattttggaagtcaatacaatcagttaatagcacgtcgaattcgtgagttcggtgtatacagtgaacttcatccacatacaattactgcagaagaaattaaagcaatgaatccaaaagggattattttctctggtggaccaaatagcgtatacggtgaaggtgcattacattgtgatgaaaaaatctttgaactaggtttaccaatcttcggtatttgttacggtatgcagcttatgacgcaacacttcggtggtaaagtagagcgtgcaaatcaccgtgagtacggaaaggctgttcttaaagtagagaacgaatcaaaattatatgcgaaccttccagaagagcaagttgtatggatgagccatggtgacttagtaactggtttacctgaaggattcgtagtagacgcaacaagtgagtcttgcccaattgctggtatgagcaatgaagcgaaaaacttatacggtgtacaattccacccagaagtacgtcactctgagcacggtaacgatttaattaaaaacttcgtattcggcgtatgtggttgttctgaaggatggaacatggagaactttatcgaagtagaattagaaaaaattcgtgaaactgttggagacaaaaaagtactatgcgcacttagtggcggtgtagactcttctgttgtagcagtattaattcataaagcaatcggcgatcaattaacttgtattttcgttgaccacggcttactgcgtaaaggcgaagcagaaggcgttatgaaaacatttagcgaaggcttccacatgaacgttattaaagtggatgcaaaagaacgcttcatgaacaagttaaaaggtgtagaagatccagaacaaaaacgtaaaatcatcggtaacgaattcatttacgtatttgatgatgaagcgtctaaattacaaggtatggactttttagcacaaggtacactttacacagacatcgttgaaagtggtacagcaactgcacaaacaattaaatctcaccacaacgttggtggacttccagaagacatgcagttcaaattaattgagcctttaaacacgttatttaaagacgaagtacgtgtattaggatctgaactaggaattcctgatgaaatcgtatggcgtcaaccattcccaggaccgggtcttggtattcgtgtattaggtgaaattacagaagagaaattagaaatcgttcgtgaatctgatgcgattttacgtgaagaaattattaaagcgggcttagaccgtgaaatctggcaatacttcactgcacttcctggtatgcgtagcgtaggtgttatgggtgacgagcgtacttacgattacacagtaggtatccgtgcagtaacatctatcgacggtatgacagctgactgggcacgtatcccttgggacgtattagagaaaatctctgtacgtatcgtaaacgaagtaaaacacgttaaccgtatcgtgtatgatgtaacgagtaagccaccagcaactattgagtgggaataaatgaataaatagctgtgaacgttgaagtaccacgtttttaaacgatatttttagaagtgtggtactcatatggaacttttttgttccattaagttatttagcttctttgcgacagcatcatgcttgtttggatacagatgtgaataaacttgcagtgtcgtctcgattttttcatggcctaatctttccgatatcaataatgggctatatcctaattcgattagaagagatgcgtgtgaatgtctaagatcgtgcacacgtatcttttttatatttgctttttttattcctcttcttaattcatataacacatagtacttagaacaatcaaataaaaaatcattatgtttaggtttgtataatttgtttttatattttacaatcaatgcacttagtgccaaagggatatgaataattcttttgctttttggtgttttgggaggatttatgacagtttcgccattcaccttttgaagtgattttgtaatggaaattgtgttgcttaataagtctatgtctttccattgcaaccctaataactccccggaacgaattcctgtccaaaaaagtatagagaatataactttactttcttttttttctaattgttcgtagaataaattgaattcctctaacgtccaaaaattcatagaatcagcttgcttttttcctatagagccgactacttttgaaggattggcagataatccgtaaaattttacagcgaaattgagtatcgcatttaattggttattaattgtttttagatatgtttggctaaacccttgagaaattagggtgttttgccatttacgtatatgcataggtttgatctcatttatggcgatttttgaaaagaatggtagtattcttgaattaataatatattttttattttcgaaagtatttggtctaatgcgatgaactatatcttccatgtataattcaactagactagcgaaactcatatcgctactttcattatgttttttatggaattctttttcccaggcgacagcatcgttcttttttttgaaaccacgtttttttttctgcttcttgtttccttcgtagtcgcggtaaacgatttttacatagtacgttcctctttctttgtctttatagataggcaacctttctcaactccttccaaataagttcaaaaattaaatgttttatatttcatgaaccgtttaggaactccataaacacttgcaatttgttctatggtgtatccagaacggagataatgataaacttcatcatcaggcatcaataattcaacagcaaaagtatttgcttctacttctaatttatctgtggaaaagagtgtctgcttattaagaaaagcggtatcttcttcagtgtgtctaacagcatgacctaattcatgagcacagacatagagttggtaaaattcttctagagtgcaattgatatgaataatttgaacgcgccgacagtaaagataatatccgtagatatgttgcaggtcttcaaatattaattcgatgtttctttctttagctattttaaatggattgtttgtgccgtgttcttttactagatctagtgcgtgttgttttatgttatccttcaacccaaagtcccccttaatttctatatttcttaggagtgaattttttcttagctatttctcgtgctaaaagcatcgaacgttcaagtgaatcttttaataccatctttgtggcttcgtcaagtggttcgccatcgaaagcggcaaaaccatttttgtcatcacccaatccatctaacattttttctaattgtttagcaatgtcttttttgtctttttcagttatttgatagtatttccgatctggttgttttttttcgataagtttatctacatcgtaccccattaaccaagcagggtttataccaaattgttttgctataacttctatagtagttagttttggtgccattttaccactacaatatcgggatacggtggctgcagaaagattaattctttccgaaagagtataaattgtttggttattctcaagcatgatttctttcaatctgatagggaatatttctttatttaaaagttgcttttgttccattttgtaacaaccccctttttcgattagtataaacaagtttgttacaaaacgcaacaacaacagaggtgaaattgacaaaaatgttacgaaacgtattgacagttgttttttttaagggtattctagggatgtgttacgaaacgtaacaataactgcaatttattagaagagagaggggtgattatatgaacaaaagacgtaaatatccagaattaaaagctttaaaaggaaaaataagagaagaaaattctagttataggaaattggctgaggcattagagataagtacaactaccttgaatgataagattaacggttactctgtgtttgatacagaagaagtaaataaaattgtgaatgaattaaaaatagaaccgaatgaggttatacgaattttttttcctcgaatgttgcgtttcgtaactaatggtgttgcttaatgaggtgtggttgatggatgtctatagatgtgaacatgtcatggatttgtttagtgtgaaagagacgaaagcgcgagaaattattaaacagcttaacaatgaactaaaagaaaaaggttatatcacggtagccggacgagttccaatagagtattttcacgaaagaacaaaaatacctaaaaataatcatgaattacggtaagcgggttaagtgaaattaatcttgatgttgtagatacagaggaggtgaatataatgaaaaacggtaaaaagccaaccaagaaggaaaagatccatattgagtcacacaatttaaattctgataattggttaatcttcaaaaagttaagtaatgaaatgcatttagtacatcgtgatacaaatacaacaaaagtaattccaaatgcataaataggaggaaaataacatggataaattaacggtagcaaatgaactacatattttaggtaaacaaaacattgcgggttatcaattcactggaatcgagggtggattcggtgaaagtaagaaagcaatgttagtaaaagaaattgctgaaattcatgggcaacaaattggagaagtaaatcgtcgtattaatgataaccgaaatcgttttaaagatactgtagatattattgatattagggctaatgggtttgagccattaggtcgattggctggatatacaaaacaatcatttaatcaatcgaagaacatctacctcctctccgaacgaggatacgcaaagcttttaaaaatccttgaagatgatacagcatgggaattatacgatcagtttgtagatggatatttcaatatgagagaacagaaacaaatccctacagacccaatgagtattttaaaactaacatttgatgcgttagaaggacaaaagcaagaactccagcacatcaaatcagatgtcaaagacttacgagaaaacgcaccattattcgcagtagagtgcgatgaaatatccaatgcagtaaaacgttatggtgttgtattacttggtggtaagaattctaatgcttatcaagaccgtggtttgagatcaaaagtttataaagacatctatagacagttgtatagagagtttggagtaacaagtcataaagcgattaaacgtggtcatttggagttagcatcaaaaatcgttgaagaatacacattaccaattgtattaagtgaagaaattacttttgtaaattcacaaataaatatggcggaagttcagtaggaggaaaagaaaatgaaagaaactaaatattttgtacttcataacagaggatatggtttaaacgcttacgagtgtgaatcaaaaattgaagcgagtcgtatgattaaggggttaatagaagatggtgaaccagcatcttctattatacttacacaacaagttgcattaaaaacaaagattcaaagtgtaatagttgagattgatgactaatcatacgctaagtttattcagaaggggaagtgatttagtggaagatacaacatcgttagtagtattcgcaatgtttatcgcatgcagtgcattgttgctttacattacttacgaaccaataaaacgatgggcatggagtgatgttgaacaaaaggaaaagacccaaggcaatgggtccctttagaaaaacacttgatgttagtataccacggaaagtagggaaatagtacatggatttaattgaatatcaagtgctattacctaatgagttttgggacttagcaaaaagcaacgatgaattaatgcaaatgattgaacagtatttcagtgttggttatccacattatgaaattcaaagaattatcaaaagcggacaagcatatgtggcggtttgtacaaggaggtaaatatttatgtcaaacgtagtaactgaaattggtgggttaaatttcaaaggtaatgtggtagatcatgaatggtttaattacatcacttttagtaatggtaagcctcacattgtagcgattatggtattgagtgaaattgtttattggtatcgtcctacagttattcgagatgaaatagatgggaaagtaacttacaagaaaaaatttaaagcggacaagttgcaaaaaaattatcaacagttagccgatacttttggatttacaaaattacaagtgaaaagagcatgtgatttattaactgatatgctacttgtcaaaatcgagtttaggactattagcgctgatgggaaaattttgaataacgtaatgtttgtggaacctgtaccaacagaaataaggaaaatttctagtatgtatcaagagataaaagaagaccctggttacttagaagtaaatagggtggttacttctaaatcaagaccctcttcacttacaagtaaggagtctcctaacttcaaagtaaagacaaatacagagattactacaaagagtactacagagaatgtaagtagtagtagcatcttctctttctacgaaaataatttcggtattttaaattcattcatagccgaaagtatttcgcaatgggtaaatgatacaagcgaagaacttgtacaagcagcaatggaacgtgctttgaaacagcagaagaaatggaattatgctgagggcattttaaaacagtgggttaataaaaatattcgtactttagctgatgttaatgcagcagaaatagagtttaaaaacaaaggtaaaaaaggagcgaaacgaaatggcaacaccaatgaaaaagctggcagaatccctggaattgaaggtgaattaccattctgatcaatgtatgaatcactcttatgaaataggtggacaaaaaatcattaagccagttcaaatgattgaatacagaggacaagttgtttgccctagatgcgtagttgaacaaaacaacaaagttttagaagaacaggctaatgctcactataaaaaaattaaccgtttgcaaaaatttaacatgctggaaaaggctagtgttattacaaataagaaaattcctctttcaagattatctgattacagaaccgggtgtgatgaaacgattagtcacaagaaagctatagaagaaactttggaggatttaaagaacggagaaattagaaaagttgtatttacaggaaatcaagggacggcaaagagtttcttagcatacagcatgcttcatgaattaaatcaatatttctgggatatcagtcagggagaagaaaactatcatcttatgaaaagttgtttatatgtggaattagaagcaataacaaggatgattatggattctttcgatgataagagcagtaaatatacacttcaatattttgttcaattaattggccaagctgattttgtagtgttggatgatcttggggcggaaagtggttcgacagattcaaatagacaagcttcagatttcatccaacgtcttttatatgcggtatcaaatgctagacaaggaatgagtacctttaccactacaaactttactggaaaacaactttttaataaatatgatgctaaaaccgttagtcgcttattaggtgattcaaaggttttgaaattcaccacagcggatcaaagacttgcaaatttaggtttctaagaaggaggaataatcatgtgtgtattatgtcgtgataaaggaattattcgtaaagaaatttattcaggtgtaactctaacggaaggttgtaactgtgaagtagcaaagcaacaacaagaagaaaatgataagcgttggaaagcgtacttaattaaatttgaggcaatgaagcaagatttacaacttaatcagcaacaaaaagttagctaacaagaaaaagggggatttcagtcgtatgaagcctacgaaagttgaaatcgatgttaatgataataaaatttacgtggtcaaaaatggtgaagttactccgctgaatcctccagcaacaggatttggtgaacaaatcattacgtggcaaagtgggaaggttgatcgcgtatcaactacgtatacggaaaaaatcaaataactggagatgcgattatgaagcaattatcgattgatgatgtaatagggagtttttgctacaacgccataagcaccagtgaaaagtttttaaatccaagttttgaagtgcatttttacgataaagaagaacgacaaaaaatggattgttttgatgctaaaactgaagtggaagcttggaatgcagcgttagaagagcacggcaagtgtattcagaagattaggataactcattcaaatcgtactaggacagaatttttggcactcgattaggagggagaatggtggcggctttaaatcgatggttaaccgatgaagaatatgcaagggctttatctaatggaattagtaggaaaacgttacattatcgtgtttatgaagcggattgggatttagaagaagcattaacagcaccgccaggaagcgtaagacataacaagtttgagggagtgcacacgaaatggcgtagaatcgctgaggcgaatgggataaacgcagctacattttacagtagattaaatagcggttggggatatcaagaggcctctacgaaaccagctataaaaagaaaaggtttgggaaaagtgtggttagaacgagctaagcccaatggaattggctatagcacgtttatgacaagagtaatcactagaaaatgggatatagaaaaggctgtaacaacaccagtaattagaactggaaaaaatgcctcagtacgattcgagaaatcgattgtgagaaactgaaggaattagaaaaggagctggagataatgaaggaagtaatcaaggaatatataaatcaattgcaacaatcagcgatggaaaacagaaaggaatcagacaaagcgtatgaagttggagatttaggtttatcaggttactatcgtggtcaatggattgcgaatgagggaacagcaattgcattagagactatcttaaatcaacacagagggaaaagtgtggattcagatctattaaagtaagaccaaatttgaattttgttaagaaatgaggaatcgtagtgaaaatggtacgtagacgtgcggttattcgtttagaaaagcaacgaaaaagcgaagatagattcagtgtgattagatgggaagtacacataaatttaggtaaacgtaattataagactaaagatatattaggtgcgtatcaagatatgcaagccaccatgaacaaagtggaaagcataatgatggattagttttataacaaaagcgttatttgaataaaaaacaaaggggaggaattagaggtggaagcgttagacttaggcggacttaaaagcaattggagagcatttaaagaattactggaaagtaaacaccaagattatttaacggagtattactttgtctttagagaagatgattgtggggatgaagcatatgcattcacgagtcatactgatttagatgaatggttatctaaaaagttttgggaatgggagcgttatgatactaggaatattgaagaatcaatgaatgacatatttgtatggaaactaatttctgaaagtgattttaaacgtttaagttctttatataagggtgcaagaaaaacgggaattgagatcgatggggaaagatactaccgaaagttgataccagtgagtgtagaacctacagtagttgtttcaactaatttttattaaaaaggatcgaaaaggggaacggaaatgaaacctacatttgaaatgataaagaatgaacatggtggggttgagatgacttatacaacgagtggagggaagcaatcttccacttacttccctggtcctccagaagatatagatcatgtttgcttggactatatgaaaggtcgctttgcaaacgttagaacgttgaagcaagtagaatttataaaacgaaaatataaagaagcttatcaaacagtattcggtgcaatggaagaattaaaagcaggtgacaaggtagtgatgcacacttgcttagaagcgaagcgttatgagggaaaagtttggacttgtagaacagatcaatttaaagcaaatagtggttcgcaagtggtgtttttagaaggatttagtggttacttctcagttaagtatttgcagcgtattagcttgttagaaaactaaacaaaatagttatttgaatagaaagggagaaaatatggaaccttcaatagaatcaattaaggctaaatgtgacgaagctgttgaaaatgcatttactagtaaccctttagtgatgttagaagtagatacaatttattggttaattgaaaaggcacaagaaaaaggagaataagatatggaattttataaaatgtcttttggcggagatcaggatataaaagttatcctggccaatagcaaatatgaagctgcaggatattatttaatgcattgtcataatggatgcggatatatggatgacgtggtgttagaaacaatgcatccagatgaaaaaattgaagtttcttgtgtcggatttccagtatatcaaacattagaagaattatataaagagaaagaatttggtgatacaccatgcgttattgtcggattagcaaattagaaaactaaacaaaattcttattttggagggaaacggaatggaaataaaagtgaatgagcaagctcaacgtttttatctagcatttgatgaatgggtacctgcagttggtcatgaaattaaagtgggaaaatatcgtttttgtgctattccattaagtaaatctattaatatttcagaagtaacatctggtgtacatgctatgagcattccgattgattttaggatttggatggcaacaagtactaaggaagatacaatgaggtttttagaaaaagcaggtgaaggtttaaagcgaatccttaaaagacaaagtaatttagatgaattacttaaaaaaaataaaaagatagcatttgatcgtttgggagaaatgccaccaattgaagatgttgatacggattggataactgctgagattagtgatgtgactcattaagtaatacaaaatctttatttgagaggggaacgaaatcgtgaaatatgataaacaagaatgtccgaaatgtagcaagccagttaaaactttatatagaccatcaatgagtcataaaggcccaaatctttgctattggtgtaataagaaacgtgttaaagaagaaaaagcaatgagcgcacaaaaataatacaaaatctctatttgaaaaacgaacaaaaagcactactggatccagtgatagttcgtgatttaatacaaaatcgttatttgaaaggaagaatgagggatggatttacaaaagttgcaagaactgaatgatcttagactcacaatagaaatgtacaacgatttaatggataaatacgatgatgaagatttcgttttagaaaacttagataacattttaaatgtttttcattcagtgccacgtctggttgaagaaattacattattacgggaagagaatcagcaattgcagtatgagttaaaagaagaaagaatttgaacaaaaacgctattttagtataaaatatttaaaaagaaggacccacattaagggggtgggtccttttaacaaagctaagcatatagagattaactatatattactaaaaacggattgggatttctatgtgttaattgttgagaaataattaataaaaatttcattttgtagaaaaggagaatggatatggtcatagatccaccagaaccatacaagcataaaaatggcacggttgttcatttaatggaggttaatccgaatgattggtactgttgggctaaatttcccgacggttacatcaaaccggtatcagaagatgttttctttagagattttgaaccattaaaaagagcagctagcaaaagctaactgttcggctggttctccaagggggaacaaggagaaagtaacttaatgggttgtctacagtattgacggaatattgagttttattcaagggaggaagaagaaatgagtaaagaacaaatattaaaaaaagaaataattaaatgggtgaaaactatgaatagtgatgacccagaacaatttaattcatgtgtaatggaattggaagatatgttgttaggatatattgagaaaaatatggaggtagagggaaatgagagcaagatattttgagtatatggtttcttatacttttggaagttataaaggaaacggaaatgggagcataattttaaagtttaatagaaggataaatgggcgcatgttaaaaaaagcaaaagatcacatagaaatgaacaataaatttcaaaacgttgttatacaaaattataaattattaagggaatgtagaagttaaaaccaaacaaaataatcctttgaatagaaagtgaggttgggaaaatgggaatgagtgtagaaggtgtgaaattctatttagaaacacccgatggagaaagcgtggaaataaagggtggtgttgattgggcggatacttctcctggtgaaacaggtaattatgattttgactttactaaagaaataagtgtgccgtgcacttttgaagaaccgcaaaatataaaagatctgcaagatataggttttacaccaccacaagcatggaatattcatttgcacaaaggtgagagttggaaagaaaactcaaaagcaagtcttttaaagtaaattaaaaatcaatattgtccggctagaaaactagaggacaccaattcattaaagcagcaattaaagctgttttaggaataggtgtcctttttattttgaaaagggagatggggaaatgaaggtgttaaaggatcagctacgtgaatggaaaaagcaatcgaatcaagcaaagaagaaaaagaagaaaaaacgaaaagagaaattaagtactcgtgaaattgaggatttaatggggatgcatagaccttgctatgaacgaagacgtggagcaataagacaaaagtaatttaaaaataaaaaggagtggtcttacatgactaaacaattatctttcttaccaaaaatcgatagaacagcgacacaagaggaattagaaggtgtgttggaaagcgtacgtatacatagacaatttgggatgatgcgtaaagaaatgaaagtcactccttcttatgaaatacgtgagcatggtcctacacatacagttggaaaaccattagaagatgttgctttagcaaatattcaacaaagtaaacgagaagagtggcttgaaagaatgtcagtacgtatcgatcagtttctaaatcgattaggaaatggacgtgctggaagtatccaaagagatattatttataaacgttatttagaagaagaggacgtatgtgattacatggtttataacgaaatagggatgtcagagcgtacttatcgccgttggaaatctaaagcattttataagcttgcttttgcacttggattagaagtttatgagacagaagagactggaggtaatgaataatgaattttgttcagccgatacgtgatccagaagaaatacagcagctaaaagaatattttaaagaaaagagcttacgtaattacattctcttcattatgggaatcaatacaggcctgagaatctcagacattttgaaattgaaggttggagatgtcaaaggtagtcatatatctatgagagaaaagaaaacagggaaacagaaacgaatacaaattactgcagcactgaaaagagaacttaaatggtttattgaagaaagagaagataatgagtatttattacaaagtagacaagggaagaatcgtcctatcgggcgtagcatggcatataagatattaagtggagcagcggcagagtttggattagatgaaataggaacacatacactgagaaagacgtatgggtatcatatgtacatgcaaacaaaaaacatagcattactcatggagatattcaatcattcgtcagagaaggtcacgttacgttatataggcgtaaaccaagatgcaatggataaagcaatgactaggtttaaaatctaagcattgctttttctttttaaatctatacagttactcataaatttcgtactgtgtaactcaaaagggaaagtttaattaagtcaataatatcaagggatttggcgaaggggtcagttacacacaatacaagatatgggtaactcattggagaaagaacaggggagataagcggttgccaaaaaccactgatttgggcaaaacagttgcaaagaataagtgaggatattgataagaaaaaataagtggcagagtcgtgaccgctttttggcaggatatgtaccggttgttttggaaataccgtgttatatttgtattgtgagaagtggcggaaaacacaactcactatgttgtttctaaatttctaaacgattcgtaatgatggcacataaaatccgaaaccagcagatggtactgattgagtgataccgttattaaggagagcttttgctcttctttgagctaacaacatcctaggtagacggaatgaggagacctgataagtcggacaagagtttctgtcgtggttgttagttgagagaagaataaaacttcatttaccgtatgcgaatttattgtaaataataacgttctctatacatttgaaattatatatcgataaaaggatgttgtgtttatttgtcgaaatatagaatgatgggaagggggtgtgtaagtatggctagaacattacatacaaaagttattatggacagtggtaaagaatatgaccttgatgttcatccagaagactttatgagtcgtatctcaaatgaaaaaggggaattgtataagggatttgttcatttttttaacctttcaataaatcctctacatgtatcttcaattgagaccgtagaagtgaaagttgatggaagttcaggagttactgcaaagtatgtgcttgaaccatttgttacagggattaaaagagattagggaatagttaatatctgaacagtcgctatcgatatagatagcggctttttattttggaggaggatgaagggtggataaacattacgtagagcggaatctatagattctattaaatgtcgagcaattaaggagtgaggatagatgtgtaatgtttctagatgttgtttagcttgtgactatcaaattaaaacttatcaagcgccagaagatgaatatcaagaagtaactgtttgtccgaaatgtaatggtgcgtttgtagatatgtttaagttagagaagtacaaacaatctaacgagactgtagaacctttattaacaattacattaacagatatagatgctaaacctatagttcattacaaaggtaaacagatagatagaaagttacgtgttgcatttgattgggaatcacaatcgattgataggattaatcggacatacattcatattgaacatgtaccagctgataataagcaattcaatactgaagttattcagcacaatcatcctattgtggaagaccaagtggagctttatcggttatgaaagaatacaaaaccaaacaacagaagcgtaagttctatgacagtggtgagtggaagagtatacgagagcaagtaaagaagagagacaactatgagtgccaagagtgtaaacgtaacggtcgagtacaaacagataccaatgagtacagtgagagtgcaaagcgtaagaagatacagctcgtcgtccatcataaaaaagaactagaacatcatccagaactcgcattggaaatagacaatcttgaaacagtctgtgtggattgccataataaagaacacggtagaacattcgaaaagaaaccgaataaatgggaaaacgatgaaaagtggtaaaactgattcagaaacaatcccccccttaaaatatttcaatctttttcggggaacgaggcaccggggagggggtcgatttttcaaatttagaaccaaattcgcgcgttatattaaattggaaaacgatgtaaatcagaagggagggatattgtggctagagtgaagcgtgaaacaatgagaaaaaggattgaaaaggatctaacaaatcaattaaaagaaaaaaagattgtaggtaatcattatactgacttaattcaagactatttatcgttgtgggatttaaagtgtgttcttgttgatgatattgaagaaacaggaataaaagtatctggcatgcatggtccgaaatccaatccttctattaatgatttacataaaacaaatgatcgaatgataaagattttagatgcacttggattagaagcatcggcagaagaaaagaaagttccttcaaaacctgtgcgctcagttaaagatttaacatgattcaaaataattatgtcactgaatatattgagatgtatcgcgcagggaaaattaagctgaataaagagcgcataatgctaattgagtacctggagaaatacattttaatacgcgatgatttgtatttcgataatgaaatgcatgaggactatataaaattcactgagaaatggtactttgaattgcaagcatttcaaaagttcctaacagcattcgtttttcttttctataaagaagatgattctgttttttacgagcaatttttaattatgatggctcgtggtggtggtaaaaacggtttaatttcatcattatgccatttctttattagtccgctgcacggaatagatcgatacaatgtttcaattgtggcgaacaacgagaaacaggccaaagtttcttttcgtgaagtctatgatgctattaaaggaaaagaaatactagaagatatgttttatcgaaccaaggtagagatactgagtaacgatacgcaaagcattattcaatatcatacatctaatgctggttctaaggatggacttcgtgacggttgtgttatttacgatgaaatacatcgatatgaaaactttgatgtagtaaatgtattctctagtggacttggaaaagtgccaaatgctagagaattttttattggtacagatggctttgtccgcgatggattcctggacaaaacaaaagagcgggcgatgaatattctaaaggggaaagatttagaagatccattattccctttcatttgcaagatagataatccagaagaaattgataatcctgatgtatgggaaaaagcgaatccgatgtttagcgagccgagaagttcttatgctaaacaattatttaaaaaggtattaactcaatataaacaattagaaaataatccttcaaaccgtgaagaattcataacaaaacgtatgaattatcctgaaacagatttaacaaagtctgtagcttcatgggaagaaatcatgcgtactggttttgaagaagatggggaaacgctcagagaggttccagatttaaaacataaagtagctgtaggcggactcgacttcgccagcattaaagactttgctgcggttggtctactctttaaacatggtgaagattatatatggaaaggtcattcatttgtacgtaaaggatttttggacaaggtgaaattaaaagcacctatatatgaatgggctgaaaatggcttactaactattgtggatgaaccagttattaatatctctcacattgtagattggtttgtaaaaatgcgtgagttatacggtgttaatacgattgtagccgatacattccgccttgatcttgtcaaaacggcacttgaagctgaaggatttatattgttgtatatccgtaatccaaaggcaatacattctcttttagcaccaagagttgaaacgttgtttgcaaacaatcgcattatttttggagataatccattgatgcgttggtacactaacaacgtctacgtccacatcaaaaaagacggcaacaaagagtatctgaaaaaagatgaatttaagcgtaaaacagatggatttcaagcttttattcatgcgctatggcaagcggataacattcttgtggatgaattcgactttatgctagatggtattaaattctaataaagggggtgataatcattggatggctagatgcagtatttaaaagaaatagtgaagtaggatttatgtttgatgtggaaatgtttattgagaaagccaatagagtacacatgaagcgactggcgattgatacctgtatatcctttttagggagaacaattagtcagtcagaatttagagtgaaaaatggtgaagaatttgaaaaggatgagctttactatcgattaaatgtcagaccgaataagaatatgacagcaagtaccttttgggagagtttcatttacaaacttatttatgataatgaagctttgattatacaagcggatgatggtgatttacttattgctgatgactttgaacataatgaatatgctgtgtttgaagatacttttacaaatgtcaccgtaaaagattatcagtttaagcgaagttttaagcaaagtgaagtcattcatttaagatacaggaatgataagttatcacctcttatcgatggtttgtttactgattatggtgatttattcggtagaatattaagttctcaaaaacgtaagaatcaaattcgcggaacagttgatatggatatgcttgctgcaaagagtgaaaaacatcaagccaaactgcaagaattcattgataacatgtataaagcaattggagaaaaagacgttgctcttattccacaacaaccaggttttaagtatgctgaaacatctggcggagggaattctggtcagagtgtggaggaaatcaataaagtaacgaatggcttcttaaatcaagtagcaatggcttttggtattccaactgctttgatatatggcgagatggctgatgtggagaagcaaacgaaaaattatatgcttttcacagtgaaacctttattaaaaaagatttctgatgaagcaaacgttaaattttttgaagaagaagagtatctttcaggtcaaaaaattgaagttaaagctgtttcttatcaaagtatatttgatcttgcgacaagcatcgataaactcatttcttcaagtgcatttacagggaatgagattcgattagaagtaggatatgaagtttctgatgatcctaacttaaatacacatcatattacgaaaaactatacgaaactaactgaatctgaaggaggtgagaatacaaatgacggtgaaaattgacgttaaaggaccaattatttcgaatgatgaagcttggatttatgattggtttgaaatggatgctacaagcccaggtaagattacaaaacaactggataacgcaaatagtgaggatttaattgtatcaatcaatagtcctggtggttatgtagatgagggttcggaaatttacacagcattaaaaaattatcctggtcatgtagaagttcaaattgttggtttggcagcaagtgcagcttctgtaattgcgatggctggtgataaagttcgaatttctccaacagcaaaaatcatgattcacaacgctgctaagtggcatggtggagatcatcgtgacatggaaaaggcagccgagatgttaaaaataacagatcgagctattgtaaatgcctatgtcattaaaagtggtaaatctgaggaagaactacttaacatgatggctgaagaaacttggatgggtccgcaacaagcattagaaaacaatttcgcggatgaaatcatgtttatggagaatccagttaaaatgacagcttcaacggctactgctgccatgcttccgcagaaagtaatcgatggctttagaaatggaaccatgaacaaaggccaaggaattacaaaagaagatttaaatgcagcattatcaggattaaaaaatgaaatcctgaatgatttacaaaacaatatagaagaacaaccaaaggagccgaatcctaaacctgtaaaaaacagtgggattaaagggctccttttaaaattataaaaaaacggaggaaacacacaatggtaattaaatttaataaatctgaagcatttactaaggcaaaagcaaagttgacggacactttaactaacgcagaaagtacagaacaagaacaaacgtcagcgtttgaaggtttctttgatgcactacaaacagatgtagcaaatacggtccgtgaacaagtaaataacgatatgcttgatcgttcaattttacagcaacgtggtcaaaatgttttaacttcagcagaaacaaaattcttcaatgcagttgttaaagaaggtggatttacagatggctcaatccttcctgtaacgactcaagagcgtgtgtttgaagatttagttacagaacatcccttattagctgaaattggtttgcaagatttaggagcagttacgaagtttatttactctgatgcaacgaaggcgtatgtatggggcgaattattcggggaaatccgtgggcaaattgatgctatcttcaaacaagaaaaaattggtcaacttaaattaactgcatttgcagcaattccaaatgatatgaaggaacttggcccggaatggattgaacgttatgttcgaactgttttagtagaaacatattcagtcggtctagaatttggctttattaatggtggcggatctgtagcacatcaaccagttggtttaatgaaagatgtaaatccagaaacaggcgctgttactgataaaaaatcttctggtaaactaacatttgctccgtctgataaaggggtaattgtagcaggcgaactttatgaagtagtaaaagctttatctgttgatgcaaaagggaaatccagaaaagtattaaataaaattgtaatggtagttaacccgattgatgcgattggcgtacaagcacgtaatacaatccagaccgcaacaggtcaatgggtaatggcattgccttataacattaaacctgtcgagtgtgaggaagttcctgttggtaaagcattattctttgtaaaaggacaatatattgctgcaatcgcaggtggatacaagctaaaagaatttgatcaaacattagctttcgaagatgctaccctttatacaattaaacaatttgctaatgggaaaccgaaagataataaagcggctcttgtttacgatttagaaatttcatttacaccacctgcagaaacaaaaactaaataaagggtgaagtaaatgagaaacgcaacaatttcagatgaaatattgcaagattttaaagaaaggatgcgtttaggtgatgaagaagaccataacctaagacgtatcctttttacatctaataaggctttactaagagtttgcggtgactatgaaattaccaatgatgaagagttcaaagaattagtctttgaacgttctcgttatgtttataacgatgccttagagtattttgataagaattttttaagccaaattaatagtttgagcattgataaagccttagaagaaattaagttagacggtgattaatatgcagccctttaaatataagcggccgttaaatgccgcaaaattaaacaaatgtatcatactagagcgaaaaatatcagaaacaaaagatgaagaaggaaatgttcatccgtctaaatggctagagttcgtaaaagtatgggcagaacctaaaacaccatttggtacaggctttagatcagaaatatttcaaggaaatgcagagtttgttattaaactaataaactttacaattcgatatcgagaaggtattaattcagcaatgcgtgtaaggtatgatgggaagttatacgagattaagtcagttattgatatcgacgaacaacataaggaaatgtgccttatttgtgaggagcgatcaaattggcagaattagaagttttcggaatagaagaatggattagggatttggaacagttaggacaagatgttccccagatcacaaagcaatcattacaagctggagcaaaggtattcaaaaagaacttagaaagaaattctcctgtgggtccggaggtgcaaaaaccaactccaaaacaatcatggcgagatggaaaacacgctaaggatgctattaatatagggaaagttgtgaaaaaaggtagttcctattcaattgaaattggatgggacaaagcagataattctccgcattattatatgaaatttcaaaactggggaacaagtaaaaatccaaacccaccacacaaagggtttgctgagaaaactttaatccaaagtgaaaaagaagccctaaaagaaatggaaagggaatttatgcggaggattacaggccgatgaaaaatttgaataaggaaatatttgatgttttacgtacagatgtagttattaaatctgagttaggtggagaatttatatatcaattaggatcaaactctccaataaagttagtttgtctagcatctaaaataaaaattgacgtttcacgttgtttgtttcgtttagttttcaaagttcaatatcgcgtttcagcgacttttataatatatcatagtatattattttcgtcaacaagttttttcgataagttgtatctctcatttgctgactctgcctattatataggctttctcttccctatgcaagtattattataaaaaaataaagagagggaaaatcccctctcttattcttctgaagaaacctcttcactcgtttcttcctcttcatctttttgtgcttttgctaccgtcgctacctcttggtcttcctctaatcgaattagacgaacaccttgtgtattacgtcccatttgagagatttgatcaactggcatacgaataataacgcctgccgctgtaattaacataatatcttcttcacctgtaacagatttaacagctactaatttaccgttcttatctgtaatgttacaagttttcagacctttaccaccgcggctttgcagacggtattcatcaatcggtgtacgctttccgtaaccatttttcgttacaattagaacatttacatcctcttcgacaatttccatacctacaacttggtcttcatcgcccaacgtaatagctttaacacctgcagcattacgtcccatagaacgaacatcttgttcattgaaacgaattagcataccgttacttgtcccgacaataatatccttatcacccgatgttaaacgtacagatattacctcatcctcttcacgaagagaaattgcaattaaaccatttgtacgtatatttgcaaatgatgaaagtggcgttctcttagaaaccccttgttttgtcgtaaagaataagaactgatcgtcaccaaattcacgaatcggaataatagcgttaatccactcacccttatctacccctaataggttaataattggtagtccttttgcagtacgactatactctggaatttcatatcctttcgtacggtatactttacccttgtttgtaaagaataaaatatgatcatgagtagacgttgttaataaatgttcaacaaagtcatcatcattcgtacccattccttgcacaccacgtcccccacggttctgtgttttgtacgtagaagctggtaacctcttaatataaccgttatgagttaacgtaatcgcaatgttttgttcaggaattaaatcttcatcttcaataaattccataccgccaattgtaatttctgttcgtctcttatcattgaaacgctcttttacttctgttaattcttcacgaataatctcaagaactttttcttcatctgctaaaatcgcttttaattcagcaattaacttcattaagtcttgatattcttgctcaattttttcacgttctaatccagttaagcgttgcagacgcatatctaaaatcgcttgcgcttgtttctcacttaaaccaaaacgttccattaagccttgcttggcaatatctgccgtttttgaactacgaattaacgtaataacttcatcaagatgatctaaagcaattcgtaatccttctaaaatatgagcacgtgcttctgctttttctaattcataagcagtacgtctacgaattactaccttctgatgctctaaataatgatatagattttgttttaaatttagtacttgtggctccccatttacaagagacaacatattaataccgaaacttgtttgaagcgctgtatgtttatatagattgtttaatagtacgtttgcattagcatcacgacgtacttccatgacaatacgcataccattacgatctgattcatcacgtaaatctgtaataccttcaattttcttatcgcgaactaattctgcgattttttcaattaatcgtgccttattaacttgataaggtagttcagttacgataatagattgtttaccgtttgacttctcttcaatttcaaccttagcacgaagcataatggaaccgcgacctgtttcataagctcttcgaattccacttcttcctaaaattaaacctgccgtcggaaagtctggaccgggaatatattccattaattccgcgatagtaatatcaggattatgacttaatgccagcacaccatcaattacttcgccaagctgatgcggcggtatatttgttgccataccaacagcaatacctgttgtaccgtttactaataaattagggaaacgcgctggtagtactatcggttctctttcggaaccatcatagttatcttgataatcaattgtattttttgaaatatcacgtattaattccatagaaatcttagacattcttgcctctgtataacgcattgcagctgctgaatctccatctacagaaccgaagttaccatgcccatctacaagcatataacgttgactaaaatcttgcgccatacgtaccattgtttcataaacggctgaatcaccatgagggtgatacttaccgattacttcaccgacaatacgtgctgatttcttatacgctttatcagctgtaattcctaaatcattcatcgcatataaaaccctacgatgcacaggttttaatccatcacgaacatctggtaatgcacgagatacgataacactcattgcgtaatctaaaaatgaggtacgcatttcatgactaatattaatttctcgaattcgtgcttgttgttgattgtctgacatcaacgagcacctcctcttacatttccgttacacatacattgatttatatgtagaagacaggaatacttagattcctgtcattactcatttaaatatcaaggttcttcacgtattttgcattctcttggataaagttacgacgtggctctactttatctcccattaaaatttcaaatgtttcgtctgcttcaattgcatcttgaagggaaacttgaagtaatgaacgtacttctggatccattgtcgtctcccatagctgagttggattcatttcccctagacctttataacgctgaatccctggcttaggttgggccggtaattctgctaagattttttcaagttccttatcgttgtaagcatattgaatttttttaccttgttgtattttaaacaacggcggctgtgcaatatagatataaccacactcaattatttgacgcatataacgatagaagaacgttaataatagggtacgaatatgtgcaccatcaacatcggcatcggtcataataataaccttatgatagcgtgctttttcaatatcgaagtctccaccaatatttgtaccaatcgccgtaataattgtacgaacttcatcatttgataaaatcttatctaagcgtgccttttccacattaataattttacccttcagcggtaaaattgcttggaaatgacgatcgcgtccttgttttgcagatccacccgcagagtcaccctctacgatgtaaatttcactaattgctggatctttcgaagagcaatcagctaatttaccaggtaaacttgaaacttctaacgcactctttcgacgtgtcaattcacgcgcttttttcgcagctacacgtgcacgtgcagccatcgtacctttttctacaatttttcgcgctacattaggattttctagtaagaacttttcaaacgcctctgagaatacagactctgtaattgttctcgcttcactattcccaagttttgtcttcgtttgtccttcaaattgtggatttggatgcttgattgatacaattgctgttaaaccttcacgaacatcctcaccagttaaattactgtccgcatcttttaaaatgctatttttacgaccatagtcgttgattacacgagttaaagctgttttaaaacctacctcatgtgtaccaccttcatacgtatggatgttattcgtaaatgagtaaatattatttgtgtatccctcgttatattgaagagaaacctcaacctgaataccatcttttgaaccttctacgtacacaggctcttcatgaatcggttgttttgagcgatttaaatgctcaacgtatgatttaattccaccttcgtaatggaattctttcttttgcttatgttcacgtttatcttcaattgttaatttaatattacgatttaaaaacgctaattcacgcatacgagttgctagcgtatcaaaatcgtatactgttgtttcttggaaaatttccggatctggtttaaatcgagttattgttcctgtttgatctgtgtcaccaatgacttttaaatccgcaaccggaatacctctttcgtatttttggtaatggattttaccttcacgatgtacaaatacttctaattctgttgatagagcatttacaaccgatgccccaacaccatgtaaaccaccagaaactttataaccgccaccgccaaatttaccaccggcatggagaacagtcataataacttctacagctggacgtcccattttttcttgtataccaaccggaataccacgcccattatccgttacacgaatactattatcttcttcgatactaacattaatttcatcacaataacctgcaagtgcttcatcaatactattatctacgatttcccacacaagatggtgaagcccttttccacttgtagatccaatatacataccagggcgtttccgaactgcctctagtccttcaagcacctgtatctgactttcatcatatgcattttcttgcatttgcttttgttccattgacacaaagatcacctacttttccatttaaacaggggttattccctatctatttcacaatctacagtgccgttcgttacatgaattgttttcgcttcttttaatgtttcgtgttcaattccgtcgacactcgtcgttgtaacaaatgtttgcacttttccttgaattgtatttaaaagatgtgattgacgataatcatctaattctgataaaacatcatccaacaaaaggattggatattctttaacctctgaataaatcaattcaatttcagctaattttagggatagtgcggtcgttcgttgttgtccttgcgaaccaaagacttgaacatttttactattaacgaagaattgtaaatcgtcacgatgaggaccaattaaagtcgtaccacggaaaatttcacgttgtttcacagattgaaaactttcatagtatacttcttttattttcgacaaatccattgattctgatacatctacacttggtttatagacaatttctaactcttctaatccacggcttatacctcgatgaattggagctgcccattcctgtagcaaatgcaaaaattcaaaacgtttttgcagtattttcgcaccatgctcaattagttgaagtgtaaatacatccaacatcgtttcctcattcttactattcccttgcatttttttcaacaagtgatttcgttgcgtgagcaccttttgatattgacttaattcatacaaatatacaggagctatttgtcctaattccatatctaaaaagcgtcttcttacttgagggcttccttttacaagatttaaatcttctggggcaaacatgacaacgttcatcacgccaatatattgacttaacttttgttgttcaagttgatttaattttgcctttttaccttttttcgaaatatttaattccaaagacaaagaactgtttcttttttgtaatttcccctttatttgaccaaaatcttcatcccagcggataagttcgcgatcattagaggttctatgagatttcgccatcgctaaaacataaatagcttccatcaaatttgttttcccttgtgcattttcgccgataattacatttaccttatcttcaaaggaaagctctaatttttcataattgcgatagttttttaattgtatttctgaaataaacaaagggctccccctttatgcctgaacttggaaagttccgcttcctggaatttcaataacatcattcgcatatagtttgcgacctcttctattttcaagttcgttgttcacgtacacttcatattcttgtaaaaaccattttacagcgccacctgtatcaattacatcagctaactttaaaaattgtcctagtgtaatatactctgttgaaattttaatacgtttcataaaatcgctcactttctgaaagtgttcattctttcattgtactaaataaactagcattaggaaagtaatacccaaaaatcaaataagggccactagcatctttaaactagcaacccttattccttacctagtaagtacgaaccggtaaaattaattgaataattgaatcatcatttactgtacgaattaagaacggtctcattgccccagtaaagctaactttaatctctgtactatccaaagcttttaatgcatccatcatatattttgcactaaaagatatttttaactcttctccatctactttttcgcattgtacttcttcgacaacttttccgatttctggtgaattcgaagaaatctctagcatttcttgctctaaagttgataatttaacaacgttattgcggccatctcttgctaatagtgaagcacgatcaattgcttgtaggaattcttttgtatttacaaaaatatccgttttactctctgctggaattaaacgtgtcgtatcaggataatttccttctaacaatcttgagaagaataataaatgttttgtacggaataatacttgatactccgtaataacgatatctaccatttcttcagactcatctaaaattttacttaattcatttaagctcttacctggaataacaacattagcttggaattcatctgcaatgttatgtccttcaatttttgcttttcgaagtgccagtctatgactatctgttgcaatacaagttaactcgctgttatataccttccagtttacacctgtcaagatcggtcttgtttcagaagtagaaactgcaaatacagtttgtctgatcatatgcttaagtaaatctgttggtatcttaaatacatgatgttcttcaatctgtggcaataacggatattctgcagaatctaaaccatttaagttaaactctgattttccagattttatttttgtcataaaatgattttctacagaaatttcgacagtgtctttaggtagtttttttacaatctcactaaaatattttgcctgtaaaacaatgcttcctgattgagcaatttctacgatttcttttccatcttcttcgactggaataaacgattcaatagaaatatcagcatcgcttcctgttaatgtaaccccttcttcagtagctacaactttaattcccgtaaggatggggattgttgtacgagaagaaactgccttcattacatcttgtacacctcttacaagatagtctttttgtattgtaaaacgcataaagaaaaacctccggtaagtataagattttatttaattaataaagataaaaaaatagtagtaatagtaatagggcttgtggatatgtggataacccctataaaggatgtaaaaacagtctatctacatgtggatagactgtgcgtaaaacaaggtaagttattcacactattcagctactactttaaaataccattaatttcttcaacttgcttttgtaattgcgtatcggtttttagtagtttagagattttttcatgggcatggataactgttgtatgatcacgtccaccaaattcttcacctatttttggtaaagaggaatctgtaagctcgcgcgataaatacattgcaatttggcgaggaaacgcaactgatttggtacgttttttcgctttaaaatcttctaatttcacttgataaacatccccgacagctttttggatatcataaatagagataatttttggcttagaatttggaataatatctttaagtgcttcagctgctaaatcagcattaatatctttattaattaaagatgaataagctacaactcggataagtgcaccttctaattcacgaatatttgaatcaatttgatttgcgatataaagcataacttcatttggtatatcaagcccttcagcttttgcttttttgcgtaaaatcgcaattcgtgtctctaaatctggcggcgtaatatctgtaataagcccccattcaaagcgggaacgaagacgatcttctaaagtcggaatttcttttggtggtcgatcactagaaattacaatttgtttactttcttcgtgtaatgcattaaatgtatggaaaaactcttcttgagtttgttcttttccagcaagaaattgaatatcatctatcaataaaacatctacgttgcgatatttattacgaaaatcaacagccttattatcacgaatagagttaataaattcatttgtaaatttttctgatgataaatatacaacttttgcatttggattatgttcaattacataatgaccaattgcgtgcattaaatgcgtctttccaagcccaactcccccgtaaataaagagtgggttatacgctttagctggcgcctcggctacagctaatgaagctgcatgggcaaaacggttaccagagccgataacaaatgtatcaaatgtatattttggatttaacatgctctgtggtaaatgagctgaatcatcttgtgctggattcggcttaactggaggcagatcaatatcctcttcagcttgactttgaggaataataaagcgaattgctaattttgcccctgttaaatcgtatagtgtttctgaaattagttcggagtaatgagattctagccagtcacgagcaaattcatttggagctgtaatcgttaatacgtctttcttcaagttatgagccgttgttgattttaaccatgtctcataactaggcttgcttacctttttttctaattcttttaaggcactattccataaatcagagatattttccaaaggtgtccctcctttactaagatggtaaaagaataaggttgcgcaacaaatgtacaacccaataaatataaaatgtatatttatacgaaacgtattttaaaacctaaaaacgtcgtttgtatatgagatagggttttcgacaaaaaaagcaaatgtggacaactatttacccacatgtgattaaaactgtccacatgttatacacaaactgtggataaaataaaggtgtggaaaacttattcaaagtgaaaacacaactataatatcaaaaaaaagtggctatagcaatgaatttaagaaagttatccacaaaatcaataccttgtggaataaacttgtccacaacacgatatactgtgtaaaagtgcgaaaaaagtttgtggatataaaaaacgtgaaaaaacatttatccacaaggaaatataggtgctgtgtaaaagtatgtgaataggttcaaaatgaatatttgatgaaaatttctagaaccattgacattttcctagttgattaactataatttataggactgtctttaacagatattcctcagggaggtgtcatataatgaaaagaacttaccaaccaaataaacgtaagcgcagcaaagtacatggtttccgcagccgtatgagcacagcgaacggacgtaaagtgctagcagctcgtcgtcgtaaaggaagaaaagtattatctgcgtagaccactgatcgttcagtggtctttttttctaataatagtgaatttccgctgatgaaatacaggagtgtcaattgatatgaagaaaaaacatcgtataaagaagaatgatgaattccaggcggtttttcaaaaaggaaaatcaaatgcgaatcgtcagtttgttgtataccaattagataaagaagaacagccaaactttcgcatcggcctttctgttagcaagaaaattggaaatgcagtagttcgtaatcgaattaagcgcatggtccgtcaggctattacagagttaaaagatgagatagattctgggaaagattttgttataatagcaaggaagccttgtgcagagatgacatatgaagaagtaaagaaaagcttaattcatgtctttaaacgctctggtatgaaaagaataaaaaagtagcgtaaggaaatgaattacactatatacataccgatacaaggaggagtaggctttgaaaaagaaattaggtttactagccatggtcgttgcattaatggcgattgccaccggttgtagtgaaacgggtcagccgattacatcgaaaagtactgggatttggaatgaatatttcgtatatccgctttctcagttaatcacgtattttgccgacttatttaacagtaattacggtttagcaattgttattacaactcttatcattcgttttgcattattaccactaatgattaaacaaacgaagagtacgaaagcgatgcaagcgttacaaccggaaatggtgaagttaaaagagaaatatagctctaaagatcaagcgacacagcaaaaactgcagcaagaaatgatgcagttatatcaaaaaaatggtgtaaatccattagctggttgtttaccaatctttattcaaatgccaattctgttcgctttttatcatgcaattatgagaacagctgaaattaaacaacatagtttcttatggttcgatttaggacatgcagacccgttctatatcttaccggtcgttgcagcaattacgacatttattcagcaaaagcttgcaatggcaggaacagctggtcaaaatccgcaaatggcaatgatgctttggcttatgccgattatgattttaatctttgcaattaacttcccagccgcattatcactttactgggttgttggtaatatctttggtattgctcaaatgtactttatcaaagggccagaaattaaggctagcaaagctggaggctcaagcaagtgagtataattactgctaaaggacaaacagtcgagctggcagtagaggatgctttaaggcaattaaatacatcaaaagatcgagtagatataaatattgtcgatgagggtaaaagaggattcttaggtttatttgggaatcgtcctgcagtagtagaagttgtattgaagaaagatccaattcaagaatgtgaagaatatttaagaaatgttattcacgatatgggtgtggaagttgagattagtaaaattgtaaaaggacgcgaaattgaatttacaatttctggtgataatgtaggtgttttaattgggaaaagaggtaatacattgaactctttacagtatttaacaaaacttgtcgcgaatcgtaacacgaagcagtatatcggtattacactagatgctgaaaattatcgtagtaaaagaaaaagtacgttagaatcactttcttatcgattagcgaaacaagtatttaatacgaaaaaaagagttattttagaaccgatgccatcttttgaacgaaaaattattcatcaggcattatcaaatcatcaaggtatcaatacaacttctgaaggaaatgaaccacatcggcatgttgtaatatctcctaaatgaccggttgctcaaatgagtgccggtttttttgagcggaaaatagatgtggataactaaaaaacactaaacttatccactgtgaataagtttagtgttttttacatggggatataataaaatgagttattcttcttttgtagataggttcgttatggtatcctaataatttagtgaaagaaataatcatgttgaaatagagataaataagcaagtgaggtgaaaggacatggaatttgatacaattgctgcgatttccacagcgcttggagagggtgcaattgccattgttcgagtaagtggggatgatgcggttgagaaagttaatcgtatttttaaggggaaggatttaacagaggttccttctcacactattcattatggtcatattgttgatttagatacaaatcaagttattgaagaagttatggtgtctattatgcgcgcaccaaggacttttacacgtgaaaatatagtggaaattaactgtcacggtggacttgtttcagtaaataaagtattgcaacttattctagcacaaggagtacgattggcagaaccgggcgaatttacaaaacgtgcttttttaaatggacgtatcgatttatcacaagcagaagctgttatggatttgattcgagcaaaaacagatcgtgcgatgaatgtagcaattaatcaaatggaagggcgattatctaaattaattggtcttttgcgtcaagaaatattagaaacattagctcatgttgaggtaaatatagattatccagaatacgatgatgtagaagagatgacacataatattttaattgagaaagcgacgcatgttcgttcggaaatcgaaaaaatattagaaacatcaaaacaagggaaaattttacgtgagggtattgctacagcaattatcggtagacccaacgttgggaaatcatcgttattaaatagtcttgttcaggagaaaaaggcaattgtaactgatattgcaggaacaactcgtgatgttattgaagagtacgttaacgtgcgtggtgtacctcttaaacttatagatacagccggtattcgggagacagaagatgttgttgaacgaattggtgtggaacgttcaaaagaaatgatgagccaagcggatttagtattagttgttgtcaactatagcgaggctttaacaaatgaggatgaagatctattccgtgcggtacaaggaaaagactttattgttattgtgaataagactgatttaccgcaagcgattgatatggaacgtgttacagagttagccgcgggaaatcgtgttattacaacatccttaattgaggaacaaggaatagatgaactcgaaaaggcaatagctgatttattctttgaaggaacaatcgattctgcagatatgacatatgtttctaatgcgagacatattggattattaacacaagcaggaaaaacaatcggtgatgcagttgaggcgattgaaaatggtgtaccaattgatatggtacaaattgatttaacaagaacgtgggaaatacttggtgaaattactggggacacagtgcatgaaagcttaattgaccagttgttctctcaattttgtttaggaaaataatatagtgaagttgtagaaagatagagattattaggaggaataaacaatgggatacaatgccggttcatacgatgtcatagtaatcggtgcaggtcatgcaggatgtgaagctggtcttgcggcagcacgaatgggctcaaaaacattaatgttaacaattaacttggatatggtagcattcatgccatgtaacccttctgttggtggaccagcaaaagggattgttgttcgtgaaattgatgcattaggcggagaaatgggacgtaatattgataaaactcatattcaaatgcgtatgctaaatacaggtaagggaccagccgtacgtgcacttcgagcgcaagctgataaattctcttaccaacatgaattaaagaaaacaattgaagaaacaccaaacttaacgttgttccaaggaatggtagagcgtttaatcgttgaagaaggtgtatgtaaaggggtagttacacaagctggtgcagaatatacagcaaaaacagttgtaattacaactggaacatttttacgcggcgagattatcatgggcgacttaaaatattcaagtggtccaaataatcagcaaccgtctattacattatctgagcatttagaggagcttggatttgatcttgtgaggtttaaaacagggacacctcctcgtgtaaacagtaatacaattgactacagtaaaacagaaattcaaccaggtgatgataagccacgtgcattctcttttgaaacaacgaaatttattatggatcaaattccatgttggttgacatatacaagtacagaaacacaccgtttaatagatgaaaatttacatcgttcagctatgtattctggtatgattaaaggaacaggtcctagatactgtccttctattgaagacaaagtagtaagatttaatgataaaccacgtcatcaaattttcttagagccagaagggcgtaatacacaagaagtatatgtacaaggtttatccacaagcttaccagaagatgtacaacgtgacatgcttagaacaattccaggcctagaaaatgttgaaatgatgcgtacaggttatgcaattgaatatgatgcaattgtgccaacacaactatggccaacacttgaaacgaaaaagattaaaaatttatatacagcaggacaaattaatggaacttctggttacgaagaggcggccggacaagggcttatggctggaattaatgcagcatgccgttctttaggtaaagaagaagttgttttaggtcgcgaggatgcttatattggcgtcttaattgatgatcttgtaacgaaaggtacaaatgaaccatatcgtttattaacgtctcgtgcagaataccgtctattattacgccacgataatgctgatcttcgtttaactgaagttggtcgtaaaattggattaattaaagaagagcgctatgagcgatttacaaataaaaaattacaaattgaacaggaaaaggaacgtttaagcagcattattattaaaccacgtcctgaagttcaagaattaattcgcaatattggcggaagtgaattgaaagatggaatacgtgcaagtgacttattacgtcgtccagagatgacatatgagcatattcatcttttagtaccaagtgaagtagaattaagtgatgaagttaaagaacaagttgaaattcagattaagtatgaaggatatattgaaaaatctttacagcaagtagagcgtatgaagaaaatggagaataaaaaaatccctgtagatattgattatgatgcgatttctagcattgcttcagaagctagacagaaattgaaagatgttcgtccactttcaatggggcaggcttcacgtatttctggcgtaaatccagcggatatttccattttacttgtgtatatagaacaaggaaaaattgcacgcgtatcgaaccaataaatagtaaggagatattgctagatgaacatagaacaatttcaatctatgctagaagagaagggaatcaccctctcttctagacagttagagcagttcaaaatctactttgaaacattagtagagtggaatgaaaaaatgaacttaacggctattacagaaaaagaagaagtatatttaaaacacttttttgattccattacagctgctttttattatgatttttcaaaaccattctcaatttgcgatgttggtgcaggggctggattcccaagtattcctttaaaaatttgtttcccgcatttaaaagtaacaattgtagattcgttgcaaaaacgtattaatttcttaaatcacttagcacaaaagttagaattaagtgatgttgcattttgtcacgatcgtgctgaaacgtttgggaaaaaagaaggtgtacgtgaatcatacgatattgtaatggcacgtgcagttgcgcgtctttctgtattaagtgagctatgtttaccgcttgtaaaagttggaggaacattcattgcaatgaaaggtgcagcagcaaacgaagaaattgaaaatggcaagtatgctttagaggtgctaggcggagagttaaaagagatgtctacgttccaattaccgtttgaagagagtgaacgtaatattttattaatcgagaaaaagcgcaagacaccaaagaaatatccacgcaaaccgggaacacccaataaattacctattgaaaaataaatcttattagacgtaagattaaattatataaatgaaaacgtaaatgtttcataggaaacattttatggagaatagtcaataggcctaaaaggtggtggaatatgtatgaaaaatacgttttctcgtttatttggctttggagataaagagagcgaattcgaattacaagacgaaagccatgaagagatagataaaaaggtatatgaagaaatacaagaaattccgatagtaaatattacccctaaccgttatcaaccaagaacagtttttgatgatgcgcgtattgatgagctagcattaacaattcgtacacatggacttattcagccgattgttgtaaggcaatatgaggatgataagtacgagattattgctggagaaagacgttttcgcgcggcaacaaagttaggttgggaaaaggttcctgcaattataaagaacttaaatgatacagagacagcttctgtagctttaattgaaaacttgcaacgtgaggaactaacggcaatcgaggaagctgtggcatatcaaaagctgattgagttacataatttaacacaagaagcattggcacaacgacttggaaaaggacaatctacaatcgcaaataagttgcgattgttaaagttgcctgaagaaataaaaagtgcattattagaaaaaagcattacagaacgtcatgcccgcgctctcattcctttaaaaaatgaggaattacaactgaaagttttacaggaaattgtggagaaacaactaaatgtaaagcaaacagaagaacgaattgcgaagttactagaggaagcgaaaccgaagcgtaaggcaaagcaaaaagcagtaagtcgagatacgaggattgctatgaatacaattagacaatctttacaaatggttactgaaagtggtttgaatgttaattctgaggaagaagaatttgatgagtactatcaaattacaattaaaattccaaagaaaaaataataatgacgtgctagagaccttatcctattggagaggtctcttttactatattttcttgttaaatgaagaaggagtttagaaataaattttgaagtttaataaaggacgtaaaagaaaaagttttatttcatgttacaataaacgtaattgttactagaataagatagaaaggttgaaagtaggtgacatcatgggaaaaatcattgctattgctaatcaaaaaggcggtgttggaaaaacgacaacatctgttaatttaggggctggattggcgcaagtaggtaaaaaagtccttcttgtagatattgatgctcaaggaaatgcaacgactggtgtgggaattgaaaaatctgaattagatcaatgtatttacaacgttcttgtggaagatgcagatgttcaaggggttatacagaaaaccgcaactgaaaacttagatgttctacccgctacaattcaattggctggtgctgaaattgaattggtaccgactatttcccgggaagtacgtttgcaaagagcattacagccagttcgtgatgaatatgactatattattatcgactgtcccccatctttagggttattaacgattaatgcattaacagcagcagattctgttattattcctgtacagtgtgaatactacgcactagaagggttaagtcagctattaaatacagttcgacttgtacaaaaacatttaaataaaaatttagcaattcaaggtgtattgttaacaatgttggatgcccgtacaaatttagggatccaagttatagatgaagtgaaaaagtattttagggataaagtatatcgctcgattattccgcgtaatgtacgcttgagcgaggctccaagtcatgggaaacctattatgcagtatgacgctaaatcaagaggagcagaagtatatatagatttagcagaggaagtgattgcaggtggctaaaggattaggaagaggaattaatgtgttttttcctgatttagatgtgaaagaagaggaaacaattcaggagattcttgtaactgaattaaggccgaatccatatcaaccgcgtaaacactttaataaagaggcgattcaggaattagcaatttcgattaaggaacacggtattctacaaccattaattgctaggaagagcattaaaggatatgaaattgttgcaggtgaaagacgatttcgtgctgcaaaagaggctggtttagaaaaagtacctgcggttgtaagacaattaaatgaacagcaaatgatggaatttgctttgttagaaaacttacaacgagaagatttaaatcctatggaagaggcaatggcataccagatgttaatgaatgagctaaatgtaacgcaagaacaattagcgaaacgtcttggtaaaagcagaccttacattgcaaattatactaggttattaagcctaccttctttcgtacaagatatgattgcaaatggtcaactttcaatggctcatgggagaactttacttacgataaaagatgaagaacaattgaagtccttattgaaacgcattgaaaaagaaggattaaatgttcgtcaattagagaaaatcgtccaagagattaatcaacacgtttcacgtgaaacaaaaaaagtgaaaaaagagcgaaatatatttttcgtagaacgtgaaacgttcttaagagaaaagtttggcacagatgtgaaaattaaagagacgaaaaaagaaaaaggtaaaatcgaaattgaattttttaataaagaagatttaaatcgtattttagaactattagcacagaaaaattaaaaagcaaaccatcttattatttatagatggtttgctttttttaatgcggataatttttgatccgtctcttttatactttgtgcgattacatcagccattttcatgactaaacttaatcttgtattttgaagaacgaaaaactccataaacccatttagattgacgataccgtgtatgtgcaaatcaccaactgcaggtaatttcttattcatagcagctccaggtttactaggtccctttccagtagtgattgatccgatattttgggactttcctaaacatgcatcaacagcaattataaatgcagtaggatattctttctgtatattctgaattttctcttctaaatttagcgcatgtactggctcatctagtgtaccgaatacttggaggttttggatgtctatttgttcaagttttgtaccaactaatgggccgagtgcgtcacccgtagagcgatctgtgccgatacaaacgagaatgagtggtatattagttttaataggaatatgggtaagtaagaaattactgattatctcggaggcttctagatcttggtgcataacgttttgagtttctttctcaaaaaatggtaagcgaaaacttccaatattcatgaagcacccatccttttaataaattttcaatatgtgttatatggtgaggaaaatggaaagttataagtgcgtaatttttgcaaaatgtgaatgaaaacggaaataatagtactagtatatatatattcgttccattttatacctggatatcggggataaaataggattaaaatcataaaattttttcagcaattaggggacttctgatacaataataagggtaactaaaaagaaattttagctagagaggtagaggtacatggatttattaacgaagtggtttaattctatgaaacagtatttattagatgctgatcgttgggctcatattggagttgcgacattaaaaatatgcattattttaataattggtgcggttgttgtgcgaattgcaagagcggttgtacgaaatgcgtttcgcatgggaagtcgttctccaattcaaatttcagaacgtcgtacagttacagtagcgaaattacttgaaaatattgtagcgtacgttgttatgttcattatgctaattgcgattttaggtgtgtttgatattaatgcatcaggtttattagcgggtgctggggtaattggtttagcagtcggatttggtgctcaaagtttagtgaaagacgttattacaggtttatttattttgttagaagatcagttttcagttggcgattatgttaaaatcggtcaatttgaaggagtcgttttagaaattggacttcgtacaacgaaagtaaagagttggacaggtgaaattcatactttaccaaatggaagtattattcaagttactaactactcagttagtaatagtgtagcgtttgttgatgtatctatttcatatgaggctgatattgcgaaagcagagcaggttattgaagatttattagtagaattaccttcaaagtacgaaaaaatggtaacaacgcctcaattattaggtgtgcaaacattagctgcatcagaagttatattacgtgttattgctgaagtagaaccgatgcaacatgcagttattgcaagggcacttcgtaaagagattaaaaatcgtcttgatttacatgggattgaaattccatatccgcgtatggttttatataatcgtgaagaattagttagtggaaaagcaatttagtatggagaggagtttggagagtggagcaaaaggaatataacttgtatgatgttgtggaaatgaagaaagcccatccatgtggcgagaatcgttggaaaattattcgtatgggaatggatatccgcattaagtgcgaggggtgtgaccattcagtaatgattcctcgaagagagtttgatcgtaaggtaaaaaaaatacttgtgaagcacgaagaatagagggagagtaacagttacagtaggtaactgttactttttttcgtttggcggaaacttgtcatttttttcgttactatctataatgatgaaagattgagacataggagtgaaaaatatgggattaacggctgggattgttggattacctaacgtagggaagtccactttatttaatgcaattacacaagcaggagcagaatctgcgaactatccattctgtacaattgatccaaacgtagggattgtagaagtaccagatgagcgtttaaataaattaacggaactagtagaaccgaaaaagactgttccgactgtattcgagtttactgatattgcaggtatcgtaaaaggtgctagtaaaggtgaaggtttaggaaataaattcttatctcacattcgtcaagtagatgcaatttgtcaagttgttcgttgttttgaagacgaaaatattacgcacgtttcagggaaagtagatccaattgatgatattgaaacaatcaatttagagctaattttagcggacttagagtctgttgataagcgtatcgagcgtgttgcgaaattagcaagacaaaaagataaagaagcggtatatgagcatgaaattttagttcgtttaaaagaagcttttgaagagggaaaaccagctcgtactgttgaatttacagaagagcagatgaagattgttaaaggccttcatttacttacaacaaaagaaatgttatacgtagcgaatgtaagtgaagacgatgttatcgatccttcggaaaataaatacgtacaaatggtaaaagaatttgcagcaaatgaaaattctcaagttatcgttgtatgtgcaaaaatcgaatcagaaatcgctgaattagacgaagaagagaaaaaagtattccttgaagaattaggaattgaagagtctggtttagatcaattaattcgtgcagcatatgatctattaggacttgctacttactttacagctggcgttcaagaagtacgtgcttggacatttaaacaaggaatgaaggcaccgcaatgtgctggtgttattcatacagactttgagcgtggatttattcgtgcagaaacagtttcttacgatgacttaatgacaaacggttctatgacagctgcaaaagaagctggaaaagtacgtttagaaggaaaagaatatatcgtaaaagacggagatgttatgcacttccgttttaacgtttaatttaatatttcctaggaaaaataaagatatgagcttggcaaatatattatatgtttgccaagttttttatgtattggtgagttgattcatataacttactatgatataatctaaactcgtgagtaattactataaattaattgctccttgcccattacgggccgtttagaccaaaaggaggtgaaagtgtaatgagaaagtacgaaattatgtacatcattcgtcctggcgttgaagaagaagctcaaaaagctttagttgaacgttttgcaggtgttttaacaaacaatggtgcagaaatcattaacacgaaagagtggggtaagcgtcgtttagcttacgaaatcaacgacttacgtgaaggtttctacatgatcttaaacgtgaaatctaacgcagaagcgattaacgaattcgaccgtttagctaagatcaacgaagacatccttcgtcatatcgttgttaaagaagaagaaaaataattgatatataagggagagtggttcgattgatgaatcgtgttatcctcgttggtcgtttaactaaggaccctgacttacgttacacgcccaatggtgttgcagtagctacttttacgttagctgtgaatcgcgcatttgccaatcaacaaggtgagcgtgaagctgactttattaattgtgtaatatggcgtaaacaagcagaaaacgtagcaaattatttgaaaaaaggtagcttagcaggcgtagatggacgtcttcaaactcgtaattacgagggacaagatggtaaacgtgtatacgtaacagaagttcttgcggaaagcgtgcaatttttagagccgcgtaatggcggtggggagcaacgtggttcatttaatcagcaaccatcaggagctggtttcggtaaccaaggctctaacccatttggtcaatctagtaattcaggtaaccaaggtaactctggatttacgaagaatgacgatccattttcaaatgtaggtcaaccgatcgacatttccgacgacgatttaccgttctaatacagtaaatttgttagttttaacaaagaatggagggaaatagacatggcaggacgcaaaggtggacgtgcgaaacgtcgtaaggtgtgtttcttcacagctaacggcatcactcgcattgactataaagatgttgatttattaaaacgtttcgtttctgagcgtggtaaaattttacctcgtcgtgtaacaggaacaagcgcgaaataccaacgcaaacttacagttgcaattaaacgtgctcgtcaaatggcacttttaccatatgttggtgaataatagcgtatgaaatgcacagtagagtcggactctactgtgcattttgctatgcttttcttttttgaaagagaggttaaaatgtgaaacaagcaagatttattactgaaggtgccgcgttgttggctatatatgcaatgttattgcttatatctatgtatgttccgattttgggtacagttgtaacttttgcgttgccgttaccatttatactattaatgataagacataaactatctaatgtgctcgtggtttttgtagcggcactttttgttactgttattgtgagtcaaccgatgaatttagtgaagacaattatgtttggattgatagggattgttttaggatatatgtataaaacaagaaaaaagccagtggaaatcttaatagctgggacgcttgcatacttaattggttttgtacttatttatgttgcgagtataaagtttttcaacatagatataatgaagcaaatgcaaagtatatttagtgaaagtatggcgaaaagcgaaaagatagtaagtgctacaggtatgccgattagtaaggaacaaaaagagttacttgcacaaatgaatgatatattacaatcattacttccgagtatacttgtgctagtttcagtatgtttttcttggattacagtgataatatcaggtagtgttttgaaaaagttaaaacatgacgttatatcttggcctaaatttaaagatatacaattaccaaagagtatcatttggtattacgttatatttattttgttagcaacttttataaaagtagaaccaacatcatatttacatatggtattttctaacctaaatgtcatatttgcactattgcttgtactgcaaggtctgacatttatcgcctttttagcgtatagaaaaggttttactaaaggggttcctattattagttttattgcatgcatgtttattccgatgctgtttcctcttgtgacaatcttaggtataattgacttagggatttcattgcgttctaaaatagggggataaaataatattccttatactattttaatctgtttaactaactggaaggtgagttagttttactttataggagttgtatacatgcctgaatttgataagaaacagtggtttttatatcctgtttatgtattggcattttttgtgtttgtgctcatttcaattctctgttattttcatttaattatggggatagctgcttttgtcattttttgtatcgtattctttatcgttatacgatttgaacttaattttcaaaggaatttcgaaaagcatacgacagatatgattacaagagtaaagaaagtaagtaatgaagcatttaaccaaatgccgattggtattttgttatacaataaggattatgggattgattgggcaaatccttatttatcttcatgtctgggacagcatgcattagctggatggcacctttacgatgtatcagaaacattacttcttttcattaaaggagaaacttctgatgatatagtctctttaaataatcgaaagtttcgcgtttttgtaaggaaagaagaaaagttaatttatttctttgatgtaacggaacaaacagaaatcgaaaagatgtacgaggatcaaaggactgttttagctgtcatctatttggataattatgatgaagttacacaaggattagatgatcaattacgtacgaatataacaagtcttgtgacatcgcgactaaatgaatgggcacttaagtatggggcgtatttaaaacgtgcatcttcagaaagattcttcgttgtgctaaatgaaagtattttgacgcagatggaaaaagggaaatttagcattttagatcaggtgcgtgaagaaacatctaaaaggaatataccacttacattaagtgtgggtgtcggatcaggtgatttacctttatcagagcttggagcaatggctcaatctggtttagatcttgcgcttgggcgtgggggagaccaagtagctattaaacaagcgacaggtaaagttaagttctatggaggtaagacaaatccggttgaaaaacgtacccgtgtacgcgctagggtcatttcgcatgcgttaaaggatttagtattagaaagtagtaatgtcattattatggggcatagggctcccgatatggacgcaattggtgctgcgattggtattttaaaagtggctcaattaaatgagcgtaaaggatatattgtgttagatgaaaatgattccgataaaggaattaagcgtttgatggacaaagtgaaacaaaatgaggagttatggtctcgttttattactccagagcaagcgatggaatttgcaaatgatgagtcgttacttgttgttgtcgatacgcataaaccttctatggtgatggagcaaaaactgttacataaaattgaaaatgtagtagttattgatcatcatcgccgtggagaagattttattgaagatccattgctagtttatatggaaccatatgcttcttcaacagcagaattggttacagaattacttgagtatcaacctaaaaatttaaagatgacaatgttagaagcgacggcattgttagcgggtattattgtcgacacgaaaagtttcacattccggacaggggctcgtacatttgatgctgcttcttatttacgctcacatggtgcagatactgtacttgtacaagaacttttaaaggaagatatggatcagtatttacgggttgcaaaagctataaaaaatgcgtacatttataaaaatggaattgcgattgctaaagttgatagtgatgattactacgatcaagtgcttattgcgcaatcggcagacacgttattaacgatgacagggattattgcatcatttgttgttgcgaaacgcggcgagaatctcattggaattagcagcaggtctttaggtgaagtgaatgtgcagctaattatggaaaacttaggcggtggcgggcatttgacgaatgcagccacacaaatgaaaaatgttacagtagatgaagctgaggagaagcttcgatttgttattgatgactatttacagggaggcacacaatcatgaaagtaatttttctaaaagacgtaaaaggtaaaggtaaaaaaggagaagtaaaaaacgtaccagatggctatgcaaataacttcttactaaaacaaggattagctgctgaagcaacaaatagcagtatgaaaactttagaagctcaaaagcgtaaagaagaaaaagatgcagcagcagagcttgaaaatgcaaaagagttaaaagagactttagagaaattaactgtagaattaaaggcgaaatctggagaaggtggccgtttatttggttctatcacaagcaaacaaatcgtagatgcaatgcaaaaatcacacaagattaagcttgataaacgtaaatttgaaatggacgatgcaatccgcgcgttaggttatacaaacgttactgtgaaattgcatccacaagtaacagcaacagtaaaagttcatgttagtgaacaataaaaataaattaagcaaggaggattgcgtatgagtgatgtacttgctgatcgtacccctccgcataatatagaggctgagcaggcggttttaggggccatattgattgatcaagatgcgttaacttcagcatcagagttattggtacctgattcgttctatcgaacgaaacatcaaaagatttttgaagtcatgcttgggctatctgataagggagagccgatcgacttagtaatgatgacatcagcaatggctgatcaaggattactagaagaagttggtggggtttcttacttagcagagttagcagaagttgtgccaactgcagctaacgtagaatattacgcacgcatcatcgctgaaaaggcgcttttacgtcgtttaattcgcacggcgactcatattgtatcggatggatacgagagagaagatgatgtggatggtcttttaaatgaggctgagaaaaaaatattagaagtatcccatcaaacgaatgcaaaagcattccaaaacattaaagatgttcttgtagatgcttatgacaaaattgaacttttgcataatcaaaagggtgaagttactgggataccaactgggtttactgaattagataagatgacagcaggtttccaacgaaatgatttaattatcgtggcagcacgtccatcagtagggaaaacggcattttcattaaatattgcacaaaacgtagcgacgaaaacggatgaaaatgtagcgatttttagtttggagatgggtgctgatcagcttgttatgcgtatgctttgtgcagaagggaatattgatgcacaaagacttcgtactggttcattaacttccgatgattgggcaaaattaacaatggcaatggggagtctctcaaatgctggtatatatattgatgatacgccaggtattaaagtaaatgagattcgagcaaaatgtcgtagattaaagcaagaacaaggtcttggtatgattttgattgactatttgcagcttattcaaggaagtgggaaatcaggagaaaaccgtcagcaggaagtatctgagatttctcgtaccttaaaagggattgcacgtgaattgcaagtgcctgttattgctttatcacagttatctcgtggtgtagaatctcgtcaagataaacgcccgatgatgtctgatattcgtgaatctggaagtattgagcaggatgctgatattgtagctttcctatatcgtgaagactactatgatcgagaaacggaaaacaaaaatacaattgaaattattattgcaaaacagcgtaacggtccagtaggttcagtggaacttgcattcgtcaaagagttcaataagttcgttaacttagaacgtcgttttgaggatggacatgctccgccggcataaaggcagtataaaaaagaaacacatttcttataataagatgtgtttctttttttttataagaaagataaggctttcataagttaaatatataattcttacgaacgaaaaagtttttttatgaaaaaatgttcgcttttcggttgacttctttttcggttttggtacaattatattgtttgaatagatcgtttgaaaattgcggaggtgctttaataatgtcttcagtagtagttgtaggaacacaatggggcgacgaaggaaaaggtaaaatcactgattttctttctgagcatgcggaagtagttgcaagatatcaaggtggaaataacgcgggacatacaattgttttcggcggagttaaatataaattacacttaattccatctggtattttctataaagagaaaatttgtgtaatcggaaacggattagtagtagatccaaaagcattacttgaagagttaaaatacttacacgatcgtggtgtaagtactgataatttacgtgtaagtaaccgtgcacatgttattttaccttaccacttaaagcaagatgagttagaagaagcaagtaaaggtgataacaaaatcggtacaacgaaaaaaggtatcggtcctgcatatatggataaagctgctcgtattggtattcgtatggctgatcttttagaccgtgaagcatttaaagagaagcttgagcgcaatttagtagaaaaaaatcgtttatttgaaaaaatgtacgatacagaaggtttcactgtagaagaaattttcgaagagtacttcgagtacgggcaacaaatcgcgcaatatgtatgtgatacgtctgttgtattaaatgatgcattagataataatcaccgtgtattatttgaaggtgcgcaaggtgttatgcttgatattgaccacggtacgtacccgttcgttacatcttctaacccaattgctggtggtgtaacagttggaactggagttggtcctgcgaaagttactcgcgttgtaggtgtatgtaaagcatatacaagccgcgttggtgatggtccattccctactgagcttcatgatgaaattggtcatcaaattcgtgaagttggtcgcgagtatggaacgacaactggtcgtccacgccgcgtaggttggttcgatagcgttgttgtaagacatgcacgtcgtgttagtggtttaacggatctatcattaaattctatcgacgttttaacaggtattccaactcttaaaatttgtgttgcttacaaatacaatggtgaagttattgatgaagttccagctaacttaaacattttagcaaaatgtgagcctgtatatgaagagcttccaggttgggaagaagatattactggtgtaaaatcattagatgaacttcctgaaaatgcacgaaaatacgtagaacgtgtttctgagttaacaggaattcaaatatctatgttctcagttggaccagatcgtaaccaaacaaatattgttcgtaacgtatacgaagcttaattaatagtgtttagaaaaaaactcatgtccgcatgagttttttcttattcttttataaaaaaacgaaaaaagtattgcaataaatacagaatacatgttatgatacatcttgtcgtcacgaaaatatgacgttggtgaatatgagccattagctcagttggtagagcatctgacttttaatcagagggtcgaaggttcgagtccttcatggctcaccattttatttttcgtggcccgttggtcaagtggttaagacaccgccctttcacggcggtaacacgggttcgaatcccgtacgggtcatgtttttttttgcttatttttggtcccgtggtgtagtggttaacatgcctgcctgtcacgcaggagatcgccggttcgaccccggtcgggaccgccacttttgtttataccaccattagtggttttatatatagttttggctcggtagctcagtcggtagagcagaggactgaaaatcctcgtgtcggcggttcgattccgtcccgagccactctcaggatattaagtgggcccacttaatatcctttttatttatgtaattttacaaaactgagtagttattttaaaatagaacgaggagcctctagcagttgaagctagaggtttttctatagatcgtataggatgccgtgtaaaagtggatcatacatgagtctatgagaatagaggagaaaatacttaaacaaaggatgcggtcatataggacatactatgtaaacatcaatatgtttagggattattgaccatatttttataaggaggaaatagacgatgatgggaaagaaaattttagtagttgatgatgaaaagccgattgcagatattttgaagtttaacttagaaaaagaaggttttgaaatagtaatggcacatgatggtgatgaagcaattgaaaaggctaatgaagagcaaccagatatggttttattagatattatgctaccaggtaaagacggcttagaggtttgccgtgaaatacgtaaaagctcagaaatgccgattattatgcttacagcaaaggactctgagattgataaagtattagggcttgagcttggggcagatgattatgtaacgaagccatttagtacgagggaattacttgctcgtgtgaaggcgaatttacgccgccatcaacaaggtggtgctgcggaaaaagaagaaaatacagaaatggttattggaccaattgtgattaatccaaatgcatatagtgtaacgaagcgcgaggaaaatatcgagcttacacatcgtgaatttgagttgctacattatttagcgaaacatttaggacaagttatgacacgcgaacatttattacaaacagtttggggttatgactattttggagatgtgcgcacagtagacgttacagtacgtcgtttgcgtgaaaaaattgaagataatccaagccatcctactttaattgtaactagacgtggagtagggtattacttgcgtgacccagagcaggaatagtatatgaagaaagttggtttttttcaatctattcatttaaaatttgtgcttatatatatgctattaatattaatagcgatgcaagttattggagtatatttcgtaagggaattagagaagagcttagtacaaggttttagggattctttaacgcagcaaacaaacttattatcatataatttgaagcaagagtttaaaaaaagttatacaaaagcagaaacagagtcaacagatgaaacgattaaaacttcaattcgaaaatttgcctctgatcagaagaaagttatacaagaggtaagtgtatttgattcgcacagaaagttactggctatttcagatgaatcaaagcagaataaggtgaatcgaacatcaactgatatagctgttcagcgagtgttagtacaaaaaaagccagaagtgaaaattgagaaggatggtagtacaggtcatcgtgttcaagttatgcttactccgattctagatgataacggtaaggatgcgcttggtgttatttacattgtggcatctatggaagatgtatataaacaaatgaaggatataaatcaaatttttgctacgggaacagtaattgctttattagtaacggccgtacttgggattttattggctcaaacaattacaagaccaatttcagatatgcggagacaagcaatcgaaatggcaaaaggaaattattccagaaaagtaaaagtgcatagccatgatgaaattggacaactggcattatccttcaataatttatcgaaaaaattacaacaagctcgttcttctacagaaagtgaaaggcgtaaattatcatctgttttatcacatatgacagatggagtaattgctactgatcgaaaaggggatattattttactaaatgaccctgcggaaaagatgttaaatgtttctcgtgaaacagcgctcgatcaatctgttttagaggtattaggaatacaggaagaatttacgctcgatcatttatatgaagagccagattctgttttattagattttagtacgagaaacgaaccatatattttacgtgctagtttctctgttattcaaaaagaaacagggaaggcaaacggcttaattgctgtactatatgatgtaacagagcaggaacgtatagaacgggaacgccgtgagtttgtggcaaatgtctctcatgaattaaggacgccattaacgacgatgcgcagttatttagaggcacttacagatggagcatggcaggatccaaatattgcaccacaatttttaacggttacacaagaagaaacagaaagaatgattagacttgtaaatgcgttgttacagctatctaaactggatagtacagagcatcgtttaatgaaagaatgggtcgactttactgatttctttaataatattattgatcgctttgaaatgtctaaagagcaaaatgtaagtttcaaacgatctttctctaagaaatctagatttattgatatggatactgacaaaattactcaagtgctgtataacattatttctaacgcattaaagtattcaccagaaggtggaacagtaacatatcgtttacgtgatcgcggtgatttattagaaattagtgtaagtgaccaaggaatgggtattccaaaagaaaacgttgataaaatctttgaacgtttttatcgcgtagataaagctcgttcaagacaaatgggtggtacgggacttggattagcaattgcaaaagaaatgattgaggcacatggtggctctatttgggcgaagagtgaagaaggaaaagggacaactatttatttcacgttaccaatggcagcagatgaagaggacgattgggaatgagtatggaaaactttaaaacaatagttttaattaacctagttgtaattagcctatttcttacttttaatctatggacgtatgtgccagattctacatccatgcaaaacgcgaaatttgtacaggggaacgaaggaatgaaccaaactaaaatttccgatgttgtccgtcctacttctatcatcgtgcataaagataaaaatcattatgggagcagaagagaggcagatatagaatcaatctataagcctctagaattaggggaactacatgattttagagagatatcaatcactaagggtgatttcctttcatatgtgcatggtgaagggaaagttgaacttgttttccctaccgatatcccatttgatgcagttaaatccatgttcaacatgaaagagaaaagtacagataagcctaaacattttaatcgtattctccttgatccttctagaagtaaggatcaagaaattaaaattaactttgtttctgatggtgataactttaaaatatacgaggcaaaattaagtggcttgtatttaaaagatattgtaaatgcccaaaatcaatttatagtatcagcaaaaccttattttgattatcaacttaatgatatgaaaaaattatttttaccagatggaacgacagagttaagcaatataacatatatttcatctaatttagcagttgatacgtttaagaatgctctgtttagtgatcctcgttatttaagtccgattaccgagatgtcgaaagaaacatttacagatggtattagatccatggaaattgaaaacgatcgtcacatgctaaagtataaaaactcttctgtcttaactgagaaaacgatagataatttaatgcttttacaaaaaagctttgaatttgtaagtggtcacagtgggagtttggattcatatcgtttggactatatgaataaaggagagacagtatttcgcttaaatgaagatggatatccagtattcaatgcagatggattagcggaattaagacaagtatggggatcagaagaagtaatggaatatgaaagaccgttgctgtctttaaatactaaaggtatagaacagaaggttactcttccgtcagggcatgttgtaatagcatccctagaaaataatccagagataaagaaacaagtaattaaggatattggcattggatacaagttatcactagatgggcaagtggttcgactacaaccaatttggtatgtaaagcttgttgaagatgaaacaggtaaacagaaaatctatgagtggagtgagggaggactaaatggattgggatcggattaaaaccatatttattgtgaccttttttgttttggacctctttctcattttccaattcattcaaaagcaagatagtaatcaattggagcttattgcagaaacaaagatagatcaagaattaaaagcaaataaaattacgatgggaaatatccctaaagaaccgaaaaaagagtcatttattagagcggaaaataaagcctttaaagaagaagatatacagtctttgaaaaatcaaacggtgcatatacaaaatatgtacaagatagaaagtaagctaaaagagccttttttaaatacgaaatcattatcaaaagataagtataatgaatttttgaagaactatgtattggatggacaaaagtatgaatttggagcggtgaaagactctaaaatttatttcttccaaaaatataaagataagcctattttctataataatcaggcgatgattgttgtggaattaaatgaaaaaaatgaacttgtttcatatacgcagacaatgctaactgatttaaaagaaatgggcgaaggtgaaaaaacgaaagagcaagaaattattacggctcaaacagctttagaaaatttgtatttaaaaaataaaattcatggaaatacgcatgttaaagaagcgcaaattggttatgccactcttaccgcatctacttctaataaccaagtacttgctccaacgtggaatttaaaaacggagcagaagcaggacttctttgtgaatgcaattgaaggacaagttatggaattaggagaaaaggaaaatcgagtggttgatgaacatactggagtgagaaagaatggggttgcattttagcgtacttgcaagtggaagtacaggaaatatgctatacgtaggaaccgatgaaaaaaaattactagtcgacgcaggtttaagtggtaaagcaacagaggctttatttaaacaagcagaactgaatataaatgatgtatcaggtattcttgtaacgcatgagcatagtgatcatattaaaggattaggtgtattggcacgtaaatatgatttgcctgtttatgcgaatgagaaaacatggaatgcaatggaacatttaataggaaatatcccaactgaacaaaagtttcttttctcagttggtgatgtgaaaacatttggtgatattgaagtcgagtcatttggagtttctcatgatgcggcagaaccgatgttttatgctttccataacaataataggaaattagcgcttattacagatacgggatacgtaagtgaccgtatgaagggcgttattaagggagctaatgctttcgtatttgaaagtaatcatgatgtagaaatgcttcgtatgggacgttatccatggagcattaaacgacgtattttaagtgacgttgggcatgtttgtaatgaagatgctgcattagcgatggcagatgtaattacagatgagacaaagcatatttatttagcccatttaagcttagataataacatgaaagaactagcgcgtatgtcagtatcacaagtactagaggaaaaaggatttggagtgggtgaatcctttgaaattcacgatacagatccaaaaatgcctacaaaaattcaatacgtataattcttcattttagtaaacaataaaggtgaatatagttgttttcaggaagataggtgaacaaatatgtcctttattgatgaagaaagttatcgtatgaaacgtgcaggaaaaaagaagcacaaaggtatagttttttctagtatagcgggaacaattgtaggagcttctttatttgcgtttggagcgcctttattttcaaattctgctgatacgcttccgcaagctgaagcaagcggaagtaatatggctgaagctcaagggattaaacagattagctttgtagatgctgttgatcgtgcatctgaagctgttgtgggtgttattaacattcaacgagataacttttcagaggcagattcagaggccggtacaggatcaggagtaatttataaaaagacagatggtcaagcttatattgtaacgaataatcatgttgtagctggagcgaatcgtattgaagtaagtctaagtgatggtaagaaggttcctggaaaagtattaggaaccgatgtagtcacagatttagctgtattagaaatagatgcaaagcatgtgaaaaaaataattgaaattggcgattctaatactgttcgcagaggagagccagtcattgcgattggaaacccacttggactgcaattttctggaacagttacacaaggtattatttcagctactgaacgtattgtccctgtagatttagatcaagatggacattatgattggcaagtagaagtgttacaaacagatgcagcgattaatccggggaatagtggcggtgcgcttgtaaatgcagcaggacaattaattggtattaattcaatgaaaattgctgcaaaagaagtagaaggaatcggccttgctattccggtgactagagctgttccgattatgaatgaacttgagaagtatggaaaagtaagaagaccttatattgggattgaacttaggtcattaaatgaaattccaaactattattggtcaaaaacattacatttaccaggtactgtaacagagggagtttgtattttggatgtgaaaagtccttcgccaggtgcggatgctggtttaagagaacatgatgttattgtggcggtagatggaaaaccgattcgcgatattattggattccgtacggccttatatgataaggaaattaatgataaaatgactcttacgttttatcgtggtacaaaaagagtaacaacaacagtgaaattaggcattcaaaagtattaaaaacaggagggcctacctcctgttttctattgtagaaaagtgaggtgtagaaaatgaatttaccttgttgtttagaacatgttgaattagcgttagatattattgtggatgagtgtgaagtcgcaccagttatcaacaatgtggataacttagaaaaagagaaaaaaacatgtgaattttgtcaaaatgaggcgacatatgttgtatcgaacacagattcccacacaatatgtgggtagcgtttgtggatatgtggataagttttgtggataacatgtttgtaaggtggaggatacgtgtgaatatctcgattatttcaattgggaaattaaaagaaaaatatttgaaacaaggtatagcagaatacttaaaacgattatctgcatacgcaaaagtagaagtgattgaattgcctgatgaaaaggcgccagaaaatttaagtgaagcagaaatgttaattgtaaaggaaaaagaaggtatacgtatactggataaaatttctgatgacacgcatgtgattgcattagctatagaaggaaagcaaaagtcatcagaagaatttgcggtaagtctagatcgccttgctacatacggaaagagtaaagtcgcatttgtaattggtggatcacttggactaagctcagaagtgatgaagcgttcaaatgaatcactttctttttcaaagatgacattaccacaccaattaatgcgattagtgttgcttgagcaagtgtatagagcgtttcggattaatcgtggggaaccgtatcataagtaatgtattctatgtaaaacactgatattatcatatttattttattatgcctataattggaggctatgtgaatggtaagtgatcagatgagatattctagactcgcaaatataacaaaaataataaatacgaaattagaactacgtgacgtattgcagcgtgtgacaatggcgatatcagaggaaattgttaggtgcgatgctgttggaatttatttacctcaggaagatggaacatttagagggtttgcaggaaaaccagagactataaatggcgtaacgcttgatactcaagtaattgatcctgaaatagacttgctggcaaaagaggttattgaaacgaaaaaacccatctatattcctgatacctcaaaggatcatcgaccagatccgagaccggttaatgcattcaaaattaagtccttattagctctgcctatctcatttgggcaagagttatttggtctagtttttttgtttgattatggaattccgatgaacttaacagattcagaaattcaaagtgttgaagcttatgtaaatatggctgcggttgcaattcaaaacgcaaataatttaaaacaaaaggaaaatcttattgctgagaagcagctgttactaaatgttacacgtgatttatcaatgtgttcctcgatacaggagagttttgataaatgctttttttacctagaacagattttagagagtaaaaatatgactgcccatcttctagatccgctaaacaaaacaacaattaaaacaacgaaattaagtaagggctgtcattggacagaagcggattggacagagaaaagctatgaagccaagatccaagaggttattcaaacaaaaaatatagatagtaagggtctattgatgattccattggtttcaatgggagaagtattaggggtaatcgtcgttggcaaagaaggaaaagctcacaattatgatgattcccaacttcaactagcaaaatctatcgttgatgctacagcccctacgttttcgaatttgttatatatggatcaactagaaagcatagtggaagagcgaacgagagagctagctgctgctaatgaaaaagttacaagtgtgattgaatgtattacggatggattttttattttaaataataaatgggaatttacgtacgtaaataagcaccaatattttccgcaaagaaaaacagcaaaagatgtattaggaaagaatatatgggatgttttcccgagtgaaatcgacacagttatgtataaggaatttcatcgtgcgatgtcagagcgaactacagttcattttgaatttctttctactgcagatgaatattggcacgaagttattgcatacccgtatgatgatggtatttgttgtatttttaaaaatataacggaaaaaaagaaatatgaacaggaattgaaaagattatccaacatagatttaatagggcaaatggcagcaggtatcagccatgaaattagaaatccaatgacaacagtactaggatttttacagttattaaaagaagataatgcctatgagaaacataataagtactttcatttaatgattgaagaacttaaccgtgccaattctattattactgaatttctctcaatgggtaatacaaggaaatcggatttgcagatgttagatttaaattcaattatccacgatattattcctttaataaagattgatacgtacaatcaaaataaatatattcaagtcgatacaaatgacattccagaattacttttaaatcgtaatgaaatacggcaattattaatgaatctatatcgtaatggcttagaagcgatgaatacagggaaagttctaaccattagcacttacaaggaaggtcaaaattgtgtggtgcttgcagtgcgggatcaaggaaaaggtatcaggcctgaagtattagagaaactgggtacgccgttttacacgaccaaagataatggaactggattggggttaggtgtatgttatgccattgctgcccgccataatgcaaaaatagaaattcaaacaggatcggaaggcactaccttttttgttaaatttaattatgaaaataataaaaaataaccttatttagaatagttacgatgaaccgtatcataaataaatttattctttgcatataaaaggataaaaagaccattggacaaaaattaccgatggtcttttaaatattattagatggtatgtagatttcctaaaataagtatgtttctatttccataaaaatatgctgtaatatgaagaggaaaaagtataagtagttagagaagtgaggaattaaaggtgaagaagtttaagaagttttacttggagattacgagtgtatgtaatcttgcgtgtagcttttgtccgccgacggaaaggcagaagcaattcatttctgtggaggattttgctaaaagattagaccaaattaaacctcacacagactacatttatttgcacgtgaagggtgagccgttgctccacccgaaaatagatcaactattagacttaagtcatgaaaaagggtttaaagttaatattacaacgaacggaacgttaattaataagagaagacataggctgttaaataagcctgcgttaagacaaatgaatttttcactgcatagttttgatggacatccaggttcgcaagataaagagggctatgtaaggagtatactttccttcattagggaagcgacaagtcaatcagatttaattgtatcgttaaggttatggaatttaactcaggataataaaacgaatgctgaaatccagaaaaatagagagttattatctataattgaaaatgaatttgatctatcttatcaaattgaagagaagcttacaccaggaaaaggtataaaaattgcagaacgtgtctttattaatcaagactatgaattccagtggccagcattacatgaagaagaggatgatgggaaaggattctgtcatggacttcgtaatcaagcgggtattttagcgaatggaacagttattccttgttgtttagatggtgaagggattattaaccttgggaatattaataatgattcattttctaacattatcgaaggtgaaagagcaacaaacattgtcgatggattttcgaaaagagttgcggttgaagaactttgcaggaaatgtggatatcgcaaacggtttgggaagtaaatatgaaataagccctcataaagcgagggcttattttttatacttgataagaatgctctaatttatcaattaatgaaccaacgtaagaaacagctttacggattgcgtctggttttgacatatctactccggcatgtttcattgtaccaccagcgatcaatagcgggttgtccttcctctttaatcatttgagctactgcagtggatgcagtgtgtgctgccttttttgtagtatttctagtaacgatttacggaaaggttcaagttttgtttcttcagttaaatatttttcaattgttccttcgccgaatatgaggatttcattatgaataaaggatagtgcagtatgtactttcgtccataaagcagaaattttggaagagttcgcttgaatacttggatttgtacgatcagtagattcttttaaatttgcatatgagtacagttttgttaacgtcattaaaagttcttcttctaaaagtaggcaatttaataaagtgtgggagctagtatgtaaatgtcctttaaatgaatcaagtttctgtatatcattttccaatgcgtttaatgcagtatgctattcggcatcagaattatacaaatcggataaatcccatgttagttcagcaggtacctctgcgcaattaagacgattttctattacatttttcaagtcgtatatcctccttattaagactatctaaaaatataatgatagaaaattcggttaaattaaaatatttttcatttttatatacaaaaaagaaggacaagcatgaaaatgcttgtccttcaagttaatttaagaattaatatactttgtcaccattgaaaatcgagtttttcacgacaacataatctacagtacgaatagcatctaattttgttccaccagcgtaagagatagaagattgaagatcttgttccatttcgattaacgtatcttctaaagaacctttatgctcaacgaacattttcttaccttcaacgtttttcttctcacccttttggaattcagaagcagaaccgaagtattctttataaagtttgccatctctttcaattgtttcccctggagactcttcgtgaccagcgaatagagaaccgatcatgaccatagttgccccaaatcgtatagatttagctacgtcgccgtgtgtacgaataccaccatcagcgataattggcttacttgcagcttttgcacaccagcgaagtgcagctagctgccaaccaccagttccgaagcctgttttaattttagtaatacaaactttaccaggtccaataccaacttttgttgcatcggcaccagcattttctaattctcttaccgcttctggagttccaacgtttccagcgataacgaagctctctggtaaatgttttttaatatgttgaatcatgttgatcacagcattagaatgaccgtgtgcgatatcaatcgtgatatattcaggtgtcagttgctcagcagctaattgttgtacgaattcatattcgtcctcttttacaccaacgctgatagaagcgattaatccacgtgattgcatatctctaatgaatgagattcgtttctctggttggaaacgatgcatgatataaaagtagttgttctcagctaaataagttgcaattctttcatcaataatcgtttgcatatttgcaggtacgacaggtaatttaaatttatgttttcctaaagtgacagttgtatcacattcagagcggctatttacaatacattttgcaggaattaattgaatatcttcatagtcgaatacgttttccatcatttacacccctaaaatacgaatattttatttttattaattaaaaatgttcgtccataggataatttacattatttttattaagaagtcaaagaatttcttaacattttttgaaaaagtagattttatacctgaaaaacaacgttaaaaacgaatttaaaacgtttttttatttttattgttcgtttatgaaaaaggttgaaaaattaagataattacacaaggttgtatgtattctttttatttttttggagtggatgtaggatactatgaaaaggttaatgctaacaatgcaagcaaaagatgttatcaagtagttgaacaatatatgaaatgaaaaggtttgtttctatataaaaagatgaatctggcatgattcaccttttatgtaaggtttcaagtataataagtagggtgatagtaacgtatacaaaagataaaaaagaaaataatacagaataaaatgaggttaatatatgagtaaaaaaagtttttctgattataaattaagtaaggaaattgtaagggcacttactgggttagggtatgatcatccaacagaagtacaaggtgaggttattccagttgcattacaaaagaaggatcttgttgtgaagtcccagactggaagtggaaaaacagcttcatttggtattccactttgtgaaatggtggagtgggaagagaataaaccacaagcattagttttaacaccaacgagagagcttgcggtacaggtaaaagaagatattacaaatataggtcgattcaaaaggattaaggctgcggcacatgcccatcaacttaagaatttgcactacccccaagtgtcaaaaaacgttattctttctaaaaagctagctagaaaccaagtgatactaggtcttttagggttgacctaacagcttgcaatcaccgtttttccttgcccccttatgggcgcacgaaatcaccataacaatatggatacctaaaattatttttatttccaccacaagtatacatcgctggattttgatcaactttcatcttagaaaactttttggctgaatcctccgagtgttgtttaacttcttgactagcaacaaaatcaatataccctggccccatattatagctttgaataattgtatccatgctaacatccttgtccgttccatatttgtacattttagcaaagtgttttaccccttgttcaatgctcaagcttgtctcttgaatttcatttggctttaatccaagtgattcggatgactgcataggatcgtttccctcacctctactctcttggtacataattcctaataaaactgctgttttctctcctaaattatatttttctaattcttttttcaaggtagattcatattgcaatacacgtttttcggtggctagcgctttatttttttgaatattggttttatgattaaaatatagcattccaagtattattcctaagcctaaaatactaataaggaacacttttataatttgttttttacttgtatccttcatatattcctcctcgtataaaaaatttaatttttcaaaggtaattggttatttacaaactatgtaatgaacatctatctcccgccctttttagactcaaacatcaatactttaaggttttaagtttaatataaaaatttaaagataaggtaaagataagataaagataagataaagggcattttttatacgtactttaaaagatattggtacaaaggggtatgtggggaaatttgttgatataaatggatttagtaataatggaaaggttaacgtacaaattattaataatggaggtatcattccagatgatttaccctatcttttcaatatgctttatataaaaactacaacataacatataataaaaaaacggcgaaccctcgacgtaggagaatccaccatcacaaataaatgattatttcacacctagtttttcttttactttcttaggaagctcatcttcctgcacttcctcccaagctgttacaccttttttatctaaatgatatacacgtaggaatgcttctttacgaagattcttttgtgcgataaattctaactctttttctttaccttccttatcaaaacccgataatgtatattcatactcctttcccatcactttaccatccatagattttgaaactcctccttttccatccatattaatttgaacgtaatattcacctttaccaatacggttgatatcacaccaaactaaaacacttgcaaatacaacttccttattttttacgtacctgtatatttttatctttttactcacttttatttttctttcttaactaacttatttaagataatctcatataaattacttaacgaattaatgctatttgcgacataaaaaaagagaggcgtctgccccctcttagaagtgaaattcaacttgctgttcttttgtaattgtctcatcccctcaggattaactgtgtcgctaaagagtaacttagctgatataatctcctcaagcttactcttaatgaatagacctacgctaccttctttcttcaccttcccatagaatttgttagcattctcatctttctcctaactaagatcttttacttttactaatttcatatgagaaatcccctccaaatgtacacactaagaatgagatttgatagaagatacttgtctacattttaacttttcctattaaaactggaatatttggtaaaatgtattaaacacgcaaataacttgatatcgtatctcatgattttaataatgattctgtttttcattgtagtaaggttgtttatctcatattgaattacctttcatttttcttacaggttcgcaatatttttgaaaagacagtttataaagccgagaattattattttttaagagatagcattgaggagtttttcatatgcactgtactatacggtactagattcccgtacagatttcatttacaattcattgtattttctttaccatttaccaagttaaaatggaacaaatttattacttagagtgtctattatgtgtatccctaaaaatatgaaaggacttattattccccaaagtaaagtgatgtaaaaaagtgtgtattgagatacttcatttaaatgttacgagtttaatactttcacgggtaaactataaaaaaagaaacaccctaaacagcaactgttcattcatataaacgctttggttctgcttagcctgttaaaattcaacttcagaagtatcggtatccaacacccgctttaattaacatcggtatttaaaataccaaaacaaaatccatatatcgttgaaagaggttgaaaattcatgtacgttttaaacaagttctttacctacaaaaagattgtacccgtcgtattactttcatgtgtaacactaatagggtgttctaatagtaatactccatctgaaccacctaagcaaacaaagcaaacaaagcaaacaaaacaaataaagcaaattaaacaagaaaatacaggtcatgattcttttgctaagcttgaaaaagaatataatgctaagcttggtatttatgctctggatacaggtacaaatcaaactattgcttatcattcaaatgatcgttttgcatttgcctctacatctaaatcattagcagcgggagctcttttacgtcagaactcaatagaagctcttgatgaagggattacgtatacgcgtgaagacctttctaattataatccaattacaaaaaagcatgtgtatacaggaatgacgttaaaagaacttgcagatgcttctgttcgatatagtgacagtacggcacataatttaattcttaaaaagttaggtggtccatccgcatttgaaaaaatcttgagagaaacgggagatacggttactaaatctgaacgatttgaacctgaattaaatgaagtacatcctggagaaacgcgcgataccagtacaccagaagcgatcgctaagacacttcaatcatttacattaggatctgcacttccaacagagaaacgtgaattattagtagattggatgaagagaaatacgactggagataagttgattcgtgcgggcgtaccaaaaggatgggaagtagctgataaaacaggcgcaggatcttatggaacaaggaatgatattgcaattatttggccaccaaataaaaaaccaattgttcttgccatcctttctaatcatgataaaaaagatgcagaatatgatgataagcttattgcagacacaactaaagtcgtattagatactttaaaagttacgaataaaaactaataaattaatagttttccgtggttaggggacatattctctaataagagtaaccatacatgaacgtcaaatgatgctaaaaaaagaaaaaacacgcagttccatttggaattgcgtgtttttattttgctaatttattttggataaccgcttgtgtcatccagtgctgattagtttgcacatggtcttttcgaacaaatgcccctatggattttgaaaaatcattatagtgaaacgcatccgttaatctaagtacatacccctcctgaatccctccaaagagtgaagtaccgttgtagcacgaacgaattaccttttcattataggggccacgatataacactggaacgtgtgcaaggcctaactttttacaccatgcaactgctgcatcccacgataaacattcatttttctcattctatattgaaaagacataaaaataggacgtcagtgctgtgtagtgaatgccatgacaagcatacacattttcaccacatatcctccagccttctggaattctatccccccatacttccttgtaacttttttacccatgttctcgatgggttatgaccacttgataacgaccttgcatgaatagcatctttataaagagatgtattttcaccatctaacttcgtacgattaattacttcctgtagtagcctttctactgtatctattttatctcatttggttttctcaatattctttacttctattttttgattgttataactggcactttcttagtatcagaaatttcactgtaaccataataaagtagaaaaaacaataaaataattgtccaaataaatataaacactttataactatacttcatatgaaaaacctcattttccctatataagtgaatgtacatacaccttataaatcctgttacataaattattggatattgcagtagtagagaatcattaagtattagaaattgttattcataaacatatccaagaaatcttcaaaaaatatcatctagacattttaacatttcataaaaatgcacagataatatttttacgtttagctaagtaatgcttattatgtaataaatccttatctctatttcaccttaatatttatatgtacaagagtctgtgtagcaactaggctgtactttaaatatgtactaaattgtgtgtgggaaaggaagcacattttatttaaagttgttactttgaaccctttaattagttggtagtcttcttcattcagacagaaaggaaatttaaagtgtgcacgtattttcaactcagactctttactacacacactcctatacacataaaacatctatacctttcgtaacattaaggaaacaaaaggaaatgatatagaaataattataatatttcgtaacaaccttgtaacacaaatgtaacacaatacatttaatcgtacaatacttttttagctaattatcaacaaagcattgttaatatcgttcaaatttaataatgttcccataaagtaatacatattgtttgtgaagtgttttttcaaaatataacgaaacctaccatgacggaggaatgttaattcaatttaagaataaatggattgatacctttctagcttttgtatcccaatcatagtatagagaggattattgttatccaataaatgtatgtgaacatatacaagctaagccttctaaataattactgtaactaaaaaaacaagtaattatacttgtttttttagtttactttccaatatcgcaacagttttatgtgctctcttttcctgtctacattattggatgcatatcttactaaagatagcttctttttttatgattctattgaagtaattaattgctgacgttctttatctctataaattttcatttcatgtttaaactcgtaatttcctacttcaaatctagcccattccttacttgtccaatatactacatctacattttcttttaagattgcagaacacacatccactaattcatctttgtaaaatggagcttcttttgctaattcaaaagcaagcacttttggatccttagttttaatttgaagttccctagaggtttgccctaaatactgccatggcgatggtattgattgaacttgggcatctcccctatcttgaaactgtgatggagaataatttgttgaagcaaatgtaggtttacttactcctattgctgttcctaaaacaatagaaccaataataagttttttaatcattttttcagcccctttaataattttggatatgcttcatttttataccacgttcacagtcatgtaaataaagataatttgacataattctgcgttttcctcgaaaaatgcatattaattacacaccttaaatttaccgaaaacaaaattgttggttaatgtaaactttcttgtcgtaagtatacaatttttgtataaaaattagtttttaaaatatttgcatacttattgataaagcttcctgccataccttattcgaagccaatttacctctacctactcacttcgcattccttgaagaaggaatcttcttgactaaaacgataaaaaagttggggatttccccaacttttttatacgtttattgtcttattaatcctgtagatgtaacccgatatgttcttttctttccgatatattcctgttttccattctcaaggttagttaaagtcgcgcgtgttttttcctttgctgcttccccttctatatgagtaaattctatataatctccctcttttacaggtactgtttgggtttcagcattttgttgtctatttcccataatttccttattgtacataacgctaccagatgagttctggactttaatacttgcatatgtgctat
